United States Patent Application Publication US 2026/0097106 A1 - sequence listing, part 2

SEQ ID NO: 13 - DNA, 5239207 bp, Escherichia coli (residues 1,746,404-3,492,806 of 5,239,207)
  source 1..5239207: mol_type = genomic DNA
ttcgccgtctcatcgtgcatggttttcgctttaacacctttcaccgcttcgatgcccgtagcaccggcatcgatgccaatagtgccgttttcatggaagatccagtcaaaaatgtagtcatagttacccactgtactgatccagcgcaccactaactcccggcgttcggtactgacgttgggctggcccatttcctgatgcttatactccggcccggcataacgttcaaataccgcgatagcgcgagggatctccatcggcacgccagtgtagtcggcgatggtttcattaaggagcactgcgttagacggggcatctttaccacgagcaattggtgaggttagcgtgcccataccgtagtcaccagagtccagatacgctttaaagtaccagccaatatcaggatcaccgtaaggcacaatcatgccgccgagagaaccttcgtacatgactttgcgtttggtgccattgtcgttataagtcacggtggagatcatcggcccgacgcgagagttcatgctgaggtgaaaatcccagttccgccagtgaatcatatcgccagtaatggtgtaatttttaccttcaggctcaatgatttgcataggcttaactgccggagcaacgcggtcacggccatcaaatgggcgtgcggtcattggcaccggaactaccggaccttcttcaatcttaacgatttttttctgttctaaatcaacgaccgccaccaggttttcgatgggatgtgcccagtagttgccatcaccgacatcaagatagctgatgactttgagcaaccgggcatcttgtttcaggccatctttaccatcgaaataacctacggtcagcggcgtggtaatcacttttttcgcatcagtaataccgcgtttcttcacggcagcggcaaattcttcactgttgttaataatgttctgcacactggcgaaatcatccagcaacaccataccgtgggcgtctttaatgggttgccaggagagcagtttgttgttttgcagatccaccaccgcttcgatgatatgtttgccgtcgagcataatgacgtcggctttgcgcggctggtcaaccggtttgttttccagcgcaaacgcccagacagcttctttatctggcggtagcagggagatctcagtaaaacgggtattgggtttgaagtccgcggaagctttaacaatttcaacggcctgtttaatttcgtccgcagttagcgcattaagtgggtgagggcgcttttctacctgaaaggtttgatccagcccggactggaaaacatcgttaataaaggtgtcagaaacccaggctttattgtctttcatcactaccggtacttgcagtgccagaggctgaccattaacaattgctgtttgcgcaccaggcttcactttcacgtacgcgccatctttaatcagggtaaagagctgggcgtagtcgtcccactgcacatcggcaccaaattctttaagcgttttatccattggcaccatatgcgcttcaccaccgtgggcaaataccggcgcttgccaggcgaaacttaaggcgactgccaacgccagggttgttttacgggcagaatacagagaggggcttcccattattaacctcgtcagatgttgtgttcttgttagcaaccgcgctctgtgggcggtttagtcaggttcacattatcagtactgatgcaaaggggattgcctgcacctgccaggttgtttggcaggtgtgccagcttttcatacagtggatgccctgaaaatagatgtacacatcatgcataatgtgacaacgtcacaaaacttagtgaaataaaagggcaactattcgccgttgcccttcattcaccgattaatcgacaaaatcaccgtgctgcctggccaccagcgtcagaattgaatacagcgccaccggggtttgatgctgattgaatacctctacagcccattccaccacacctgttggtttttcttctgcgctacgctgttttttcagcgtcttgcgcttacaggtgagacgcacctggatggtatcgcctggctttacgggttcgataaaacgcaagctttccagcccgtagttagcaatgaccggaccgacaccggcatcgacaaacagacccgcagccgcagaaagcacaaaatacccatgcaccacccgctcaccgaaaatagattcggcagcagcaatcttatccatatgtgcatagaaatgatcgccgctgaggcaagcaaagttaacaatatcggcctctgtcattgtgcggcggggagtcaacaggctgtcgcctggttgtagctcctcaaaatatttgcggaacggatgaatacgatcttcttcgactttcgcaccgcgcacccactgtttactgatagcggcaagcatcgtcggactaccctgaacagcggttcgctgcatgtaatgtttcaccgctcgtaaaccgcctaattcttcaccgcctcctgcgcgaccaggcccaccatgtaccagttgtggcagtggggagccatgcccggtggattcttttgccgactcttcattgaggatctgaattcgcccatgcgtacgtgccgcgtcggcaataaactgacgcgcaatttgcggatcagccgtcaccagcgttcccgcaaggctaccgccgcctgcacaagccagttgcagagcatgtcgctggttttgtgctggcatcagcgttgcgacagggccaaaggcttctgttgcatgtaccgccggtgtttcatccggctgcggacagtacaataaggttggcgggaagaaggcacccgcagcagataaatccgcctgaccaccgaggcgaatctcgcatcctgcagccagcaatatgttcactttttcctgcacatcggcacgctgctcagcatttaccagtgcgcccattttcacgccttcctgagcaggatcaccgaccacgactttctgtaatcgcgcaaccagagcatcactgacagcattaaccaatgcctgcggcacaataatccgccggattgccgtacatttttgcccggcttttgtggtcatctcacgcacaacttcacgaataaacagcgcaaactccggttgaaccggggtgacatcttcgcccagtacgcagcagttcagggaatcagcttccatagtgaaggggatagatttggcgacgatatttggctgaactcgcagcatctgtccggtcgccgctgaccccgtgaaagtcaccacatcctggctgtccagatgatccaacaagtcgccagcactaccgcagatcagactaattgcgccttcgggaacaagaccactatcgacaattgatttcaccatcgcctgagtcagttgggccgtcgcggtagctggtttgatgatggctggcattccgcccagccacgttggtgccagcttttccagcattccccagcaggggaagttaaaggcgttaatatgcactgccacgcctgactttgaggtcagtaaatggcgcgcggcaaatccaccttctttcgataaggggatcaattcatcttccggccacagcgtatcgtcaggcagctcccggctaccgaggctggcgtaagtaaataacgtcccaatgccaccttcaatatcaacccaactgtctgcccgcgttgcgcctgtttgcgcagaaagagcatagaaacgctctttttcactcagcagatgtttagcgaccgctttaagcatcgccgcacgttcgataaaggtcatagcgcgaagggcgggggcacctttttcaatggcaaactggcgggcagccgccatatcaagaccttcactggtcacttcccataacgcctcgccgctaatagcgtggtgaatcaaacggctacggccccggccagactgccaggtaccggataagaaactggctaactgctgcatcgctactctccagatgtttcacatttctgttgctaatagttaaattgcgaatcataaaaagcaagggatcttttaacgaaatgttaactatgcaatctgtatagcaactgcggaaaacattaatgcactgataaataatgatttataaaaatagggtgcgaaatccgtcacagttcaaacatacaaaatttgtgattttacttaactattgtgtaactttcataaaacaatgtgattcgtgtttttaattaattcacgaaaactggaatcgtaaaggtgatgacgtgacccaagaagaacgctttgagcaacggatagcccaggaaacggctatcgagccacaggactggatgcccgatgcttaccgaaagacattgatccgccagattgggcagcatgcgcactccgagattgttggtatgttgcctgaaggtaactggatcactcgcgcaccaaccttgcggcgtaaagccattctgttggccaaagtgcaggatgaagccggtcatggtctgtatctctatagcgccgccgaaacactgggctgcgccagagaagacatctaccaaaaaatgctcgacggacggatgaaatattcctccatctttaattatccgacattgagttgggctgatatcggtgttatcggctggctggtggatggcgcagcgatcgtcaatcaggtggcgttatgccgcacttcttatggcccgtatgccagagcaatggtgaaaatctgcaaagaagagagttttcaccagcgtcaggggtttgaagcctgcatggcactggcgcagggcagcgaagctcaaaagcagatgttgcaagacgccattaaccgtttctggtggccagccttaatgatgttcgggccaaacgatgataactcgccaaacagcgccagaagtctcacctggaaaatcaaacgtttcaccaacgacgaactccgccagcgtttcgtggataacaccgttccacaggttgaaatgctcggtatgaccgttcctgacccggatctgcattttgacactgaaagcggtcactaccgctttggtgagatcgactggcaggagtttaacgaagtaattaacggtcgcggaatttgtaatcaggagaggctcgacgccaaacgtaaagcctgggaagaaggtacctgggtacgggaagcagcgctggcccatgcacaaaaacaacatgcccgtaaggtcgcataaggagattcaaaatgagtaatgtttactggccgttatacgaagttttcgtgcgtggcaaacagggcttatcacaccgccatgttggcagtttacatgctgccgatgagcggatggcactggaaaatgcccgtgatgcttacacccgtcgtagcgaaggatgttcaatttgggtggtgaaggcgagtgaaattgttgcctcgcaaccggaagaacgcggtgaattttttgatccggctgaaagcaaggtctatcgccatccaacgttttacaccatccctgatggcattgagcacatgtgaggtcggaaatgaatcagttaacggcttacaccttgcgcctgggcgataactgcctggtgctctcccagcggttgggtgaatggtgcggtcacgcaccggaactggaaatcgatctcgcactggcaaacattggcctcgatttattaggtcaggcacgcaacttcttatcgtatgccgctgaattcgcgggagaaggcgatgaagataccctggccttcacccgagacgagcgccagttcagcaacttattgttggttgaacaaccaaacggcaattttgccgacaccattgcacgccagtatttcatcgatgcatggcatgtggcgctctttacccgtctgatggaaagccgtgatccgcaactggcggcgatttctgccaaagcaattaaagaagcgcgctatcacctgcgttttagtcgtggctggctggagcgactgggcaatggtactgacgtatcagggcaaaagatgcagcaggccatcaacaagttgtggcgttttaccgccgaactgttcgatgccgacgagattgatattgcactgagtgaagagggtattgcggttgatccacgcactttacgcgcagcgtgggaagccgaagtttttgccgggatcaacgaagccacattgaacgtaccgcaagagcaggcgtatcgcactggcggtaaaaaaggactgcataccgaacaccttggacccatgctggcagaaatgcagtatctccagcgtgtcttgcccggtcagcaatggtaacagaggagatgggtatgcaacgtctggccaccattgcaccgccacaggttcatgagatatgggcgctactcagccagatcccggacccggagatcccggtgctgaccattactgatttaggcatggtgcgtaatgtgacacagatgggagaaggatgggtgatcggctttacgccgacatattccggttgtccggcaacggaacatttgattggcgcgatacgtgaggcaatgacaaccaacgggtttacccccgttcaggttgtgctgcaactcgacccggcatggaccaccgactggatgacccccgatgcccgtgagcgtctgcgagagtatggcattagcccgcccgccggacacagttgccatgcccatttgccgccagaagtacgttgcccgcgctgcgccagcgtccataccacacttatcagtgaatttggttccacggcctgcaaagcattgtaccgctgcgatagttgccgcgaacctttcgattatttcaaatgtatttgaggatgccatgacaacgtttcattccttaacagtggcaaaagtcgagtcggaaacccgtgatgcggtgaccattacctttgcggtgccccagcctttgcaggaggcgtatcgctttcgccccggtcaacatttgaccttaaaagccagctttgatggtgaagaattacgccgttgttactccatttgccgcagctatctgcctggcgaaattagtgtggcggtgaaagccattgaaggcggacgtttctcccgctatgcccgcgaacacatccgccagggtatgacgctggaggtcatggtgccgcaggggcatttcggctatcagccgcaggccgaacgccaggggcgctatctggcaattgcagcaggatcaggtattacgccaatgctggcgattatcgccaccactttacaaaccgagcctgaaagtcagttcaccctgatctacggtatgggcgcgattgcaggcctttaataaaccacttatcgcagccgtcaatggttacgcgcttggggcgggttgcgaactggcattgttgtgcgatgtggtggttgccggagagaacgcgcgttttgggttgccggaaatcactctcggcatcatgcctggcgcaggcggaacgcaacgtttaatccgtagtgtcggtaaatcgttagccagcaaaatggtgctgagcggagaaagtatcaccgctcagcaagcacagcaggccgggctggttagcgacgtcttccccagcgatttaaccctcgaatacgccttacagctggcatcgaaaatggcacgtcactcgccgctggccttacaagcggcaaagcaagcgctgcgccagtcgcaggaagtggctttgcaagccggacttgcccaggagcgacagttattcaccttgctggcggcaacagaagatcgtcatgaaggcatctccgctttcttacaaaaacgcacgcccgactttaaaggacgctaatgatggaattcatcctcagtcatgtagaaaagggcgtgatgacactaacgctcaaccgcccggaacgcctgaacagttttaatgatgagatgcacgcacaactggcagagtgcctgaaacaggtcgagcgcgacgacactatccgttgcctgttacttacaggtgccgggcgcggattttgtgctggtcaggatcttaacgatcgtaacgttgatcccacaggccccgcaccggatttagggatgtcagttgaacgtttctataacccactggtacgtcgcctggcaaaactgccaaaaccggtgatctgtgcagtcaatggcgtggcggcaggggcaggcgcaacactggcactggggggcgacatcgttattgctgcccgttcagcaaaattcgtcatggcgtttagtaagttaggcttaatacccgattgcggtggaacctggttactgccacgcgttgccggacgagcgcgcgccatggggctggcactgctggggaatcaactgagtgctgaacaggcgcacgaatgggggatgatctggcaggttgttgatgatgaaacgctggcagataccgcgcaacagctggcacggcatctggcgacacaaccgacatttggtcttggacttatcaagcaagcgataaatagcgctgaaaccaatacgctcgatacgcaactggatctggaacgtgactatcagcgacttgccggacggagcgcagattatcgtgaaggtgtcagtgcgttcctggctaaacgctcaccgcagttcacggggaaatagcatgatgataaatgtgcaaactgtggcagtgattgggagcggcaccatgggggcaggcattgctgaagttgctgccagtcatggacaccaggttttactgtatgacatttctgctgaagcgctgacccgcgcaatcgacgggatacacgcgcggctaaattcacgcgtgacgcggggaaaactgactgctgaaacctgtgaacgcacattgaaacgcctgatcccggtgaccgatattcacgcgctggcagctgcggacctggtcattgaagcggcgtctgaacgtctggaagtcaaaaaagcgctctttgcacagctggcggaagtttgcccgccacaaacgctattgaccactaacacttcgtcaatctctataaccgcgattgctgcggagataaaaaatcctgaacgtgttgcggggctgcatttttttaacccggcaccggtgatgaagttggtggaggtggtcagtgggctggcaacggcggcggaagttgttgagcagttgtgtgaactaacgttgagttggggtaagcagcctgtgcgctgtcattcgactcctggatttatcgttaaccgtgttgcgcgtccttattattccgaggcctggcgggcactggaagagcaggttgctgcaccagaagtgattgacgctgcacttcgcgatggcgctggtttcccgatggggccgctggaattaaccgatctgattggtcaggacgtcaattttgctgtcacctgttcggtgtttaacgctttctggcaggagcgtcgttttttaccttcgctggtgcaacaggaactggtgattggtggacggttgggcaagaaaagtgggctgggcgtgtacgactggcgcgcggaacgtgaggcagttgttggcctggaagcggtaagcgacagttttagcccaatgaaagtagaaaagaaaagtgacggtgtcacggaaattgacgatgttttattgattgagacacaaggcgagacggcacaggcgctggcaatacgactggcacgcccggtggtagtgatcgataaaatggcgggcaaggtggtgaccattgctgctgcagcggtgaacccggactcagcgacccgcaaggccatttattacctgcaacagcagggcaaaacagtgctgcaaattgcagattacccaggaatgctgatttggcgaacggtagcaatgatcatcaatgaagcccttgatgcgcttcaaaaaggcgtggcctctgaacaggatatcgataccgccatgcgtcttggggtgaattatccatatggcccacttgcctggggagcgcaacttggctggcagcgaatattaaggctccttgaaaatctacagcatcactatggcgaagaacgctatcgcccatgttcattgctgcgccaacgggcgcttctggagagcggttatgagtcataaggcctggcaaaatgcccatgcaatgtatgagaacgatgcctgcgccaaagcgcttggcatcgacattatctcaatggatgaaggctttgctgtagtgaccatgaccgtcactgcacaaatgcttaacggtcatcaaagttgccacggcgggcagctattttcactggctgatactgcctttgcctacgcctgcaatagccaggggctggcagccgtcgcttctgcctgcacgattgattttttgcgtccaggctttgccggagacaccttaactgctactgcgcaggtacgtcatcagggcaagcaaaccggtgtttacgacatcgaaattgttaaccaacaacaaaaaacggttgcgctgtttcgcggtaaatctcaccgcatcggcggcaccattacaggagaagcctgatgcgtgaagcctttatttgtgacggaattcgtacgccaattggtcgctacggcggggcattatcaagtgttcgggctgatgatctggctgctatccctttgcgggaactgctggtgcgaaacccgcgtctcgatgcggagtgtatcgatgatgtgatcctcggctgtgctaatcaggcgggagaagataaccgtaacgtagcccggatggcgactttactggcggggctgccgcagagtgtttccggcacaaccattaaccgcttgtgtggttccgggctggacgcactggggtttgccgcacgggcgattaaagcgggcgatggcgatttgctgatcgccggtggcgtggagtcaatgtcacgggcaccgtttgttatgggcaaggcagccagtgcattttctcgtcaggctgagatgttcgataccactattggctggcgatttgtgaacccgctcatggctcagcaatttggaactgacagcatgccggaaacggcagagaatgtagctgaactgttaaaaatctcacgagaagatcaagatagttttgcgctacgcagtcagcaacgtacggcaaaagcgcaatcctcaggcattctggctgaggagattgttccggttgtgttgaaaaacaagaaaggtgttgtaacagaaatacaacatgatgagcatctgcgcccggaaacgacgctggaacagttacgtgggttaaaagcaccatttcgtgccaatggggtgattaccgcaggcaatgcttccggggtgaatgacggagccgctgcgttgattattgccagtgaacagatggcagcagcgcaaggactgacaccgcgggcgcgtatcgtagccatggcaaccgccggggtggaaccgcgcctgatggggcttggtccggtgcctgcaactcgccgggtgctggaacgcgcagggctgagtattcacgatatggacgtgattgaactgaacgaagcgttcgcggcccaggcgttgggtgtactacgcgaattggggctgcctgatgatgccccacatgttaaccccaacggaggcgctatcgccttaggccatccgttgggaatgagtggtgcccgcctggcactggctgccagccatgagctgcatcggcgtaacggtcgttacgcattgtgcaccatgtgcatcggtgtcggtcagggcatcgccatgattctggagcgtgtttgagcatatcaacctgcgagtaccctacaatgataaccaatacaaagcttgacccgattgaaaccgcgtctgttgatgagttacaggcgttgcaaacacagcgtctgaaatggacgctcaaacacgcgtatgaaaatgtgccgatgtatcggcgcaaattcgacgcagcaggcgtacatcctgatgatttcagggaactttcagacctgcgtaaatttccctgtaccaccaaacaggatctgcgcgacaactatccctttgacacctttgccgtgccaatggaacaagtggtgcgcattcatgcttcttcgggaaccacaggtaaaccgacagttgtcggctatacgcaaaacgatattgataactgggccaatattgtagcgcgttctttgcgtgcggcagggggctcgcccaaagacaaaattcatgttgcctatggttacggcctgtttactggtgggctgggtgcgcactatggtgccgaacgtctgggcgctacggtgatcccgatgtctggcgggcagacggaaaaacaagcgcaactgatccgtgattttcaaccagatatgatcatggttacgccatcttattgccttaacctgattgaagagctggagcggcagttgggcggtgatgccagcggttgctcgctgcgggttggagtatttggtgctgagccgtggacacaggccatgcgtaaagagattgagcgtcgcctggggatcaccgcactggatatttatggcctgtcagaagtgatggggccgggggtggcgatggagtgtctggaaactaccgacggcccaaccatttgggaagatcatttctatcctgaaattgttaatcctcatgacggcacaccgcttgccgatggtgaacatggcgaactgttattcaccacgctgaccaaagaagcattgccggtcattcgttaccgcacgcgtgatttaacccgactgttaccaggaacggcgcggactatgcgccgcatggatcgcatcagcggacgcagcgatgacatgttgattattcgcggtgtaaatgtctttccgtcacaactggaagaagagattgtcaaattcgaacatttatcgccgcattaccaactggaggtgaaccgccgggggcatcttgattcactttctgtgaaagtggagttgaaagaaagtagcctgacattgacgcatgagcagcgttgccaggtatgccaccagctgcgccatcggattaagtcgatggtggggatctctaccgatgtgatgatcgttaactgtggcagtatcccgcgttcagaaggcaaggcgtgtcgggtgtttgatctgcgcaatattgttggtgcctgacgtatcgtctggccctggtggggtaaagcgccagggccagaagtcgatacgacctgtgctatgattcataaatcacaacaataacaacagactgaagcgaatgagtaaacttgatacttttatccaacatgctgtaaacgctgttccggtcagtggcacatctttgatctcctctctgtatggtgattcgctttcccatcgtggtggtgaaatctggttgggtagtctggctgctttgctggaagggctgggatttggtgagcgtttcgtgcgcaccgctttgtttcgtcttaataaagaaggctggctggatgtttcccgcatcgggcgacgcagtttctatagcctcagtgataaaggcttgcgcctgacgcgacgggcagaaagtaaaatttatcgcgcagagcaacctgcatgggatggtaaatggctcctgttgctctcggaaggtttagataaatcaacgctggctgatgtcaaaaagcagttgatctggcaaggttttggcgcactggcacccagcctgatggcatcgccgtcgcaaaaactggccgatgtacagacacttttgcatgaagcgggtgtggcggataacgtgatttgttttgaagcgcaaataccactggcgctttctcgcgcagcactgcgtgccagagtagaagagtgctggcatttaactgaacaaaatgccatgtacgaaacctttattcagtcattccgcccgctggtgccgcttttaaaagaggcggcagacgagttaaccccggagcgggcatttcatattcagcttttactgatccatttttatcgccgtgtcgtccttaaagacccattgttgccggaggagttgcttccggcacactgggcagggcatacggcgcgtcagctgtgtatcaacatttatcagcgcgtagcgcctgctgctttagcgttcgttagtgaaaaaggtgaaacctcggtcggtgaactgcctgcgccgggaagcctgtattttcaacgttttggcggcttgaatattgaacaggaggcgttatgccaatttatcagatagacggtctgactccggttgtgccagaagagagttttgtccatccgacagcggtattgatcggcgatgttattctcggcaagggcgtttacgttgggccaaatgccagcctgcgtggcgattttggtcgtatcgtggtgaaagatggcgcgaacattcaggataattgcgttatgcacggttttcccgagcaggatactgttgtaggagaagatggacatattggtcatagcgctatccttcacggctgcattatccgccgcaatgcattagtgggaatgaacgcggtagtgatggacggtgcggtgattggcgagaacagcattgttggtgcatccgcatttgtgaaagccaaagcagaaatgccagctaattacctgattgtcggcagcccggcgaaagcgattcgtgaactcagtgagcaggagttggcatggaaaaagcagggtacgcatgagtaccaggtgctggtgacacgctgtaagcagacgttacatcaagtcgagccattgcgggaaattgaacctggcaggaaacgcctggtatttgatgagaatctgcgaccgaaacagtaacagatgtaaaattattttgtccctttaattataaagcagagttatgtttaagctctgctttatttatttgagtattaattcataccgttttttcatcatataattatttataatgagaatgtggttttaatttgtaatttatattatatacacaatttatatatttcatggtctttttttattcacctgaattataattgtgaattataggaaagtatgtttgattagataataatctactggcaatattggatgtcttctatgttttaaataactaattggtcgggttagtgcatccggctttctttatattcgccagaaggatttattatgcaaaggaaaactctattgtcggcctgtattgcattagctctgagtggtcagggttgggcggcagatatcacagaggtagaaaccaccacaggtgaaaagaaaaataccaatgtgacttgtccggcagacccaggaaaactcagtccggaagagcttaaacgcttaccctctgaatgctctcctttagtcgaacaaaacctgatgccatggctttccacaggcgctgctgcgttaatcacggccttagccgtagtggaactaaacgacgatgatgatcatcatcatcgcaacaattctccactcccaccgacaccccctgatgatgaatcagacgacactccagttcccccaactcctggcggagatgagataataccggacgatccggatgatacgcctacacctcccaaaccggtttcgtttaataatgacgttattctcgataaaacagaaaaaacgttaactattcgcgattcagtttttacttataccgagaatgctgacgggactatatctctgcaagatagcaatggtcgtaaggcaacgattaatctttggcagattgatgaagcgaataacactgttgcccttgaaggggtgagcgcagatggcgcaacgaagtggcaatataatcacaacggtgagcttgttattacgggtgataatgccacagtaaacaacaatggcaaaaccaccgttgacggtaaagattccaccggtacggaaatcaacggtaataacgggaaagtgattcaggacggcgatctggatgtcagcggcggcggtcacggtattgatatcaccggtgacagcgcgacggtggataacaagggcaccatgaccgtcaccgatccggagtccatgggtatccagatcgacggtgacaaggccatcgtcaataacgaaggcgagagcaccatcaccaacggtggcaccggcacccagattaatggtgatgacgccacggcaaacaacaacggcaaaaccaccgttgacggcaaggattccaccggtacggaaatcaacggtaataacggaaaagttattcaggacggcgatctggatgtcagcggcggcggtcacggtattgatatcaccggcgacagcgcaacggtggataacaagggcaccatgaccgtcaccgatccggagtccatcggtatccaggttgacggcgaccaggcggttgttaataacgaaggcgagagcactatcaccaatgacggcaccggcactcagatcaacggtaacgacgccaccgcgaataacagtggaaaaaccactgttgatggaaaagattccacgggtaccaaaatcgcgggcaatatcggcattgtaaatctggatggtagcctgactgttacaggcggtgcgcatggtgttgagaacattggtgacaacggcacggttaacaacaaaggagatattgttgtttccgatactggatcgattggcgtgctcatcaacggtgagggggcaacagtatccaatacgggtgatgttaacgttagcaatgaagcgacagggttcagcatcacaaccaacagtgggaaggtttcgctggcaggcagtatgcaggttggcgatttctcgaccggggtagatcttaatggcaacaataacagcgtgacgctggcggcaaaagatctaaaagtggtcgggcagaaagcgacgggcataaacgtttctggcgatgcgaatacagtgaatatcactggtaacgttctggttgataaggataaaaccgcagacaatgcggcggaatatttcttcgatccatccgtgggtatcaacgtttacggcagtgataataacgtgacgctggatggaaagttaactgttgtatcagacagtgaggttacttctcgtcagagtaatttatttgatggcagcgcagagaaaacgtcaggtctggttgtgattggcgatggcaataccgttaatatgaatggtggacttgaactgattggagagaaaaacgcgcttgcagatgggtcgcaggttacttccttgcgcacaggatatagttataccagcgttattgtcgttagtggtgagtcgtcggtatatctgaatggagatacgacaatcagcggagaattccctctggggtttgccggggttattcgggtacaggataaagctttggtgatgctgccaacttactgatttagtgtatgatggtgtttttgaggtgctccagtggcttctgtttctatcagctgtccctcctgttcagctactgacggggtggtgcgtaacggcaaaagcaccgccggacatcagcgctatctctgctctcactgccgtaagacatggcaactacagttcacttacgccgcctctcagcccggtacgcaccagaaaatcattgatatggccatgaatggcgtcggatgtcgcgccagtgcacgcattattggcgttggcctcaacacgattttccgccacttaaaaaactcaggccgcagtcggtaacctcgcgcatacaaccgggcagtgatgtgattgtctgcgctgaaatggacgaacagtggggctacgtcggtgctaaatcacgtcagcgctggctgttttacgcgtatgacaggatgcggaggacggttgtggcgcacgtcttcggtgaacgcactctggccacactggagcgtcttctgagcctgctgtcggcctttgaggtcgtggtatggatgacggatggctggccgctgtatgaatcacgcctgaagggaaagctgcacgttatcagcaagcgttatactcagcgcattgagcggcataacctgaatctgagacaacatctggcaaggctgggacggaagtcactgtcgttctcaaaatcggtggagctgcatgacaaggtcatcgggcattatctgaacataaaacactatcagtaagttggagtcattaccaagctttgctggaaattggcagtggcgctacgctaacaatgcaggatattgacagttttgaacatcatgggacaagaaccccagaacttacttatgctgattccggtgcgaaaattgttaataaaggtactgttgaaattcagaatttaggttttgcttttgttactggtgaaaatacaacaggtataaatagtggcacgatctcgttattacaaaatggtaaagatccggcaccgtctcccattgttttactggctactaacggagggagcgccactaatgcaggtacgatcacaggtaaagtgacggaacaacatagcgtatttaacaagtattcaacgggcacatcgaattcatttatttttaataacgatgtcagtagcataacagggttagtcgctcaatcgaatagcacaattatcaatactgacagcggcatcattgatttgtatggtcgtggtagtgtcggcatgcttgctatagcagattcaacagcagaaaatcagggtaaaattacactggattctatgtgggtagatgcaaatgacactaccgcaatgcgagatatagctagcaacagcgccattgacttcggtacaggtgtgggagttggtactgatagttatagtggtgcagggaaaaatgcaacagcaattaaccaattgggcggtgttataactatttataacgccggcgcaggtatggcggcctatggcgccagcaatacagttattaaccaggggacgattaacctcgaaaaaaatggtaattatgacgatagtctggcagcaaatactctggtagggatggctgtttatgagcatggtactgctatcaacgaccagacgggtgttatcaatatcaatgttggtactggtcaggcgttttataacgatggcacaggaacaattgttaactatggtacaatctgcactttcggcgtgtgccaatcggggaatgagtacaataatacagatgatttcacctcactgatctataccggtggcgatacgattacacgaagcggagaaactgtaacgctaaataaatctgctgctgtgactgataagctggctgggaatgttgttaatagcggaacgctttccggtgatcaaattacggtatcaagcggtcttctggaaaataccagcggtggcatcatcaataacttagtaaaacttgacaagggtgccgtcattaaaaatgccggggtgatgacgaataacgtcgatgttagcggtggaatcctcaataatgccggagaaatgactgcgcaaattaccatgaatgctggtgctgatagttcgttagtgaacaacaccggaaccatcaataaaatcgtgcagaacgcgggggtattcaataatagtggcagtgtaacagggcggatgatgtcggctggcggggtctttaataatcaaactgacggggcgattatgagaggtgctgcgctgacaggtactgcagtggcaaataacgaaggaacctggaacctcggaagtagtagtgagggtaacaacaccgggatgctggaagttaataataattcagctttcaataaccgcggcgagtttattcttgataacgacaagaatgctgtgcacatcaaccagtccggtacgctttataataccggtcacatgaacatcagtaattcttcccacaacggagccgttaatatgtggggcggaaatggtcgttttatcaatgacggaacgattgatgtttctgcgaagtcactggtagtcagcgctaataatgccggcgatcagaatgccttcttctggaaccaggataacggggtcatcaacttcgatcacgacagcgccagtgccgtgaaagtcacctacagcaactttattgcccagaatgacggcatcatgaacatcagcggcaccggtgctgtggctatggaaggtgataagaacgcgcagctggttaacaatggcaccatcaacctcggtaccgcaggcactactgacacgggtatgatcggtatgcaactcgatgccaacgccacggcggatgcggtaatcgaaaacaacggcaccatcaatatcttcgccaatgactcgtttgcatttagcgtactgggtacagtaggtcatgtggttaacaacggcacggtggtgattgccgatggggttacgggttctggactgatcaagcagggcgacagcatcaatgttgaaggtatgaacggtaacaacggtaatagcagcgaagtgcattatggcgactatacgttgccggatgtgccgaagcccaatacggttagtgtaacgtcgggaagtgatgaggctggtggcagcatgaacaacctcaacggctatgtcgtcggtaccaacgttaacggcagcgccgggaagctgaaggttaacaatgccagcatgaacggcgtggagattaacacgggctttaccgctggtacggcagacaccactgtgagttttgataacgtagtggaaggtagcaacctgaccgacgctgacgccatcacctcaacgtccgtggtatggactgccaaaggcagcaccgatgccagcggtaacgttgacgtcaccatgagcaaaaatgcctacaccgatgtggcaacagatgcctcggtgaatgacatcgcgaaagcactggatgcgggttacaccaacaacaaactgtttaccagcctgaacgtcggcacgactgctgaactgaacagtgctctgaaacaggtcagcggtagccaggcgaccacggtattccgcgaagcgcgcgtgttaagcaaccgctttagtatgctggcagatgccgcgccgaaagtgggtaacggtctggcgttcaacgttgtcgcgaaaggcgatccgcgtgccgagttaggtaataataccgaatacgacatgctggcattgcgtaaaactatcgacctgagcgaaagccagacgatgagtctggagtactgtatcgctcgtctcgatggtgatggtgcgcagaaagcgggtgataatggcgttacaggcggttatagccagttttttggcctgaaacatcagatgtcgttcgataacggcatgaactggaataacgccttgcgttacgacgttcacaaccttgacagcagccgctcgattgcatttggcaacacgaacaaaacggctgataccgacgtgaaacagcagtacctggagttccgcagcgaaggggcgaagactttcgaaccgagcgaaggactgaaggttacgccatatgcgggtgtaaaactgcgtcacacactggaaggtggctatcaggagcgcaatgccggagactttaacctgaatatgaacagtggcagcgaaacggcggtggacagcatcgtcgggctgaaactggactacgcaggtaaagacggctggagcgctagcgctacgctggaaggcgggccgaacctgagctacgcgaagagccagcgtacggcaagcctggcaggcgcaggcagtcagcactttaacgtcgatgacggtcagaagggcggcggcatcaatagcctgacaagcgtcggcgtgaagtacagcagcaaagaaagttcgctgaatctggatgcgtacaactggaaagaggatggcatcagcgataaaggcgtgatgctgaacttcaagaaaacgttctaatttttagcatgtgatccctaaaccgcaacgctgatacaggttgcggtttttttattgccggatgtggtacgtgacgcgttttgttttgtgtctttcaggacaatagagcaactcatccagtaatcttgtttacaccttcgcattatttatctcttttcgtttctatactgatttttcttaatccgttttattacagggcagggtgcgatgagcagcaatacatttactctcggtacaaaatccgttaaccgtcttggttatggcgcgatgcaactggcaggtcctggagtttttggccccccacgagatcgccacgtcgctataaccgtgctgcgtgaggcgctggcattgggcgtcaatcatattgataccagcgacttttatggtccgcacgtcaccaatcagattatccgcgaagcgctttatccttactctgacgacctgacaattgtcactaaaattggtgcgcggcgtggagaggacgcatcctggttgcccgcattttctccggcagagctgcaaaaagcggtgcacgataatctacgtaatctcgggctggacgtgctggatgtggttaacctgcgcgttatgatgggggatggtcatggcccagcggaaggatcgattgaggccagcctgaccgtgctggcagagatgcaacaacaaggcctggtaaaacatattggcctgagcaacgtcacaccgacgcaggttgcagaggcgcgcaagattgccgaaattgtctgtgtgcaaaacgaatacaacatcgcgcaccgtgctgatgatgcaatgattgatgctttggcccacgatggcattgcctacgtgccgttcttcccgctcgggggctttacaccgctgcaatcgtccacactttccgatgttgctgcgagcctgggtgcaacaccaatgcaggtggcgctggcgtggctgttacagcgttcaccgaatattttgctgatcccagggacgtcttcggttgcgcatttacgggagaatatggctgctgaaaaattgcatctttctgaggaagtgttgtctacgttggatggtatttcgcgagaataacgaatatacaaaagggaaagatgcatttcccttttttcttttttaatggcatggagtgcatatgtttaaggccaggaattgcggctggatacgtttactgcccctgtttatgctgagtctaccagtacaggcggaacttcgatgtgttgcaaatgcagttgatattgaatcatttttttctgcggctaccgctgaagataaacaacaagttgaacaagctatcaacagtagcgtgaatcttgtccccttcggtttatctgcatcgaactggaaagtgcatcgtggcgatttagtggtagaaggtaatatagagagtaatcaaaaattgattgttcttgggaatttgacagtcaaaggtaatatttccactttctctctttctaatccatgggttattctcggtaacgtgacggcaacgaatatagttgcggattcaccactgttaattaccggttcgataaatgcaagtggactggtatttatcgactcatattacgataatccgtctacgattaaggggagtattaatgcgcgtgggatatttatcaatgacataattgcacctgttgttgcgtcttcgacaaatagtgaattcatggtccgtgcgagtgacaaacatgacactgaaaatgtcaaaaaagcgctgatgataataaatcctgatgcatattattgggggctaattaatgatgaagatgctctgaaagaaatttttaagcgaagcaatattcgcatggcagggaatgtctgtaatcagatgaaaaaagaagcgctgtttcgccctaagccttctcctgggttagtgcaagaattgcaaatgctggatgaaggcaaagttgctgcatttgaaggacgagacattgcgacatttgatcttgccgtaatgcgaactctcccaaggcttaaaggaatttcagctaacctacgcaaacaacttattaatagcaatgatgaacaaacgattgaaagtatggcgagatatatgcctgacaatgagattctggagttgaccgatcagcaattgggttaccagcctgttgttctggggttgctcgaccgtgaaccgctctctgtcgaaataatgacgcgaatgagtcgtctacctgatggtgtcggtccgttgaatcttgcgctacgtgaaaatctccctctggatatcgtcatgactctggcgaaaagagattgggatatgatcattcaggagctttataaagatgcgtggttattgcctgaatccattattgatggctatatccgcagtgatgattcctctattcgtcaggtcggtgctggaggacaactcacctacaatcaggcaatgcagttggcgaacgattcatcaaacaatgttgtcacaagcttagcgttcaagctggcagagatgaaacaccatggtcaattgttgcggatgacgccacaagagagtgacaaagttgcaggctatttataccaaaaattcgagaatgacgatgatctaatacgtgtgttatttttagcattgccagataacttacagtttaattttgttaaaaggatggagaaaaaatccccggcctacttttgctgtcgggatatgcaggtaattcactctgacgctgctttacaacggttattgacacgtttcaacgatcctgaagggtggagtaatctggcgaaaaatcagtatctgagcacgtcgatgaaacaaaaaatttggcaacgtgctttatcgcatcggaaaaataatccgaaagcagattcagatgcatatgaaaccagcgctgatatgattttgtctgagctgattagccacggcgaagttgatgaccagatgctattaaatgccaccgccctgatacgttcggacgactgggactttttagagagtgcattaattagttgggataatttacccgctgttgttctcaaggaattacagcaaaacacgccacgcaatgatatttgggcgaagttttttctgaggcaggaaaacagttcccgtgcgcaggttgacgaagcgttacgtgtttattatgcactagaccccgatgcgttagcacaactggatgtactggcaaaacaaccggatcgtatatggtggagtacactggcgaaaagcaatctcacatttttcaagttcggcgcacttaacaaccgccacacaccgcctgcagtactggcggcagaaattgatcccgagtggtggattgtggcgatgaataatccccgttttccagttgatgtattaaaggcgaggctgaaacgtgatcctttgctggcgttagagcttgttaaccctgaactggatttagtccgccagctggcgcttaacggtaagacgcgcgcaatacgggaacaagcgatgagaaaacttgatgagttgtattgatccacaacgtaatgttttttaactatctgattaattggggataatcattcctgacagtgagtccccaataccttgatatattctgaatttttaatgaaacggcgtgttgcgatatctccgtcaggggaattgatgcaccatagcgcaaaccgaattatcaaggattgataatgacgctctaccagataaaaccgctctttcagtcgctgttaaggccgacgatgttttggctttataagcaccacgttacagcgaatcacatcactcttgctgcactggcgctttctcttcttaccggattgctgttgatgttggcggcacaacccatcctctttttgctattgcccatcgtgctttttatccgtatggcgctcaatgcgctggatggcatgttggcgcgtgagtgcaaccagcaaacacgtctgggggcgattttgaatgagactggcgatgttatttccgatattgcgctctatttaccatttttatttttaccggaaagtaacgcatcactcgtgatactcatgttattttgcaccatattgaccgagttttgcggtttactcgcgcagacgattaacggtgttcgcagttatgccggtccatttggcaaaagcgatcgcgcgttaatatttggtctgtggggtctggccgttgccatttatccacagtggatgcagtggaataatcttttatggagcattgcttcaattctgcttctctggactgcgattaatcgttgtcggagtgtgcttcttatgagcgctgaaatataatgctggaaaaatctctggcaacacttttcgcgttgttaattttagcaacgctgataaaccgttttctgctatggcggttaccggagagaaaagggggtgaggttacattacgtattcgtacctggtggggcatcgtcatttgtttttcaatggtgatttcaggtccacgctggatgacgttgacgttttttgcgctgataagttttctggcattgaaagaatattgtacgcttatatctgtacattttccgcgttggttatattggggtattcctcttaactatttgcttatcggttttaattgctttgagctgtttctgttatttatacctttggctgggtttctgatattagccaccgggcaagttttagtgggtgacccctctggttttctgcataccgtgagcgccattttttggggctggataatgaccgttttcgccttgagtcatgccgcctggttattaatgttgccaaccacaaatatccagggcggggcgttactggtgttatttcttttggcattaaccgagtcaaacgatattgcacagtatttatggggaaaatcctgcggcagaagaaaagtggtccctaaagtcagcccgggaaaaacattggaaggtctgatgggcggcgtcatcaccatcatgattgcgtcactgattatcggaccgttactgacaccgctaaatacattacaggcattattagcgggtttgttaattggtattagtggtttttgcggcgatgtcgtgatgtcagccatcaaacgagatattggtgttaaagatagcggaaaactattgccaggacatggcggactccttgacaggattgactcattaattttcaccgctccggtatttttttattttatacgctactgctgttactgaaggaaaatagagaaaatggaaaattcacgcatccctggggaacatttttttaccaccagtgataatacagcgttgttttatcggcactggcccgctttacagcccggggcgaaaaaggtcatcgtcttatttcatcgcgggcatgaacattctggtcgtctacaacatctcgttgatgaactggcgatgccagatactgctttttatgcctgggatgcccgagggcatggaaaaagttcggggccgcgtggttatagcccatctcttgcgcgttcagtgcgggatgtcgatgaatttgtccgttttgctgccagcgacagccaggttggactggaagaggtggtagtgatcgcgcaaagcgtcggcgcagtgctggttgccacatggattcatgattatgcacctgcaattcgcgggctggtgctggcttctccggcctttaaggttaaattgtatgtgccgctggcacgtcctgcgctggcgttatggcatcgtctgcgtggtctgttttttattaattcctatgtgaaaggacgctatttgacccacgagcggcaacggggggcgagtttcaataatgatccgctgatcacacgggcgattgccgttaatatcttgctcgatctctacaaaacgtctgaacgtattattagagatgcggcggcgattacgctccccacgcaacttctgatatcaggcgatgactatgtggtgcatcgccaaccgcagattgatttttatcagagattacgtagccctctgaaagagctgcatctgctgccaggcttttatcacgacacgttgggtgaagagaacagggcgctggcatttgaaaaaatgcaaagctttattagtcgtttatatgctaacaaatcgcaaaaatttgattatcagcatgaagactgcacaggaccatcagcggatcgatggcggctactttctggtggacccgtgccattatcgccggttgatttagcgtatcgctttatgcgaaaggcgatgaaattgttcgggacgcactcttcgggcctgcatctcggaatgagcaccggctttgattcaggcagttcgctggattatgtctatcaaaatcaaccgcaaggtagtaacgcattcgggcgtttagtcgacaaaatctacctgaacagtgttggctggcgcggtattcgccagcgcaaaacccatttacaaatactgattaaacaagccgttgccgatctccacgccaaaggtttagccgtccgcgtggttgacattgccgcagggcatgggcgctatgtactggatgcgctggcaaacgagcctgccgtaagcgatattttgttacgtgattacagcgagttaaatgttgcacaggggcaagagatgattgctcaacggggaatgtctgggcgggtgcgttttgaacagggcgatgcgtttaacccggaggaactcagcgcgttaactccgcggcctacgctggcgattgtctctggcctgtatgagctttttcccgaaaatgagcaggtaaaaaactcactcgcaggtcttgccaatgccatcgaaccgggcggcattctcatctacaccgggcagccgtggcaccctcaactggagatgattgccggggtgttaaccagtcataaagatggtaaaccgtgggtaatgcgcgtgcgttcgcaaggggagatggattcactcgtgcgtgatgccggatttgataaatgcacacaacggattgatgagtggggtatttttacggtttcgatggcggtgcgtcgtgataactgaacgtcggaacgtattgctacaaggcgctggctggttattgttgctggccccgtttttcttcttcacctatggatctcttaatcagttcaccgcggttcaggaccttaacagccatgatatccccagtcaggtattcggttgggaaacggcgatcccttttcttccctggactattgttccttactggagtctggatcttttatatggattttcgctgttcgtttgtagcacgacattcgaacagcgccgacttgtccaccggcttattctggcaacggtaatggcctgctgcggttttttgctctatccgctgaagtttagttttatccgtcctgaagtgagtggggtgacgggatggctattttcgcaacttgaactgtttgatctgccttataaccagtctccttcgctgcatattattctctgctggctactttggcgtcactttcgtcagcatctggctgagaggtggcgtaaagtctgcggcggatggtttttactcatcgccatttcgacgctgacgacctggcagcatcattttattgatgtcatcacagggctggcggtaggtatgttgattgactggatggtgcccgtcgaccgtcgttggaattatcagaaacctgatcaacgtcgaatcaaaatagcactgccctatgtcgtaggcgcgggctcgtgcattgtattgatggagctaatgatgatgattcagttatggtggtcagtctggttatgttggccagtattatcgctactcataattggccgtgggtacggtgggcttggcgcgataacaacagggaaagatagtcaggggaaactaccgcccgccgtttactggctgacattgccctgccgcatcgggatgtggctgtctatgcgttggttttgtcgtcgcctggagccggtgagcaaaatgactgctggtgtttatttaggggcgtttccacgacatattccggcacagaatgcggttctggacgtcacctttgaattccctcgcggacgagccacaaaagatcgactctatttttgtgtaccgatgctggatctggtggttccggaagagggggagctccgacaggccgtggcgatgctggaaacattacgcgaagagcaaggcagcgttctggtccattgtgcattgggattatcgcgcagtgcgctggtggtggcggcatggttgttatgttacggacactgtaaaaccgttaatgaagcgattagctatattcgagccagacgcccgcagattgtgctgacagacgagcacaaagcgatgctgagattatgggaaaacaggtaagtggattgagatgtggactgaatatctacagtccacatcaagaccgtgtccggttatgcagaaacaatgctgtcgatggctgcttttgcgtcagactgtgctttcgctgccatttccggaccgtatgcgatcccttcggcgaagacaaatttcacatcggtaatgccgataaagccgaggaacgtggacagatacggcgtcaccaggtccgttggtccatctttgtggatcccgccgcggctggtaataacgatggcttttttacccgttaccagaccttccggaccgttctcggtatagcggaaagtaacgcctgcgcgggcaaccaggtcaaaatagtttttcaactgagtcgagatgttgaagttatacatcggtgccgcaataacgataacgtcgtgggctttcagctcggcaatcaactcatcggaaagtgccagagcttcctgctgacgcggagtcagcggcgcatcgctcggacgcagagcgccaaccagttcgccatccagtaccggaatcggatttgcagccaggtcgcgaacggtgatttcatcagcggagtgcttttcgcgccattgttcaacaaaataatcggacaactgattagactgagagtaccctgccaggatgctggatttaagaactaataccttgctcatggtgtttccttatagatgtttgaatgggcgatgccccgttgcttgttgacactttattcacaatcctgccacagagatagcgcaataaaatcgaagcctatgttcgaatttattgaacaacgcatagaaagccgcgatgtggtactctatatctatcatttaaaagaaaattaatcaggcagactactgcccactaacgttatgacagaacaacaaaaattgacctttacggccttgcagcagcggctggattcgctgatgctgcgtgacagactgcgtttttctcgccgtctgcacggcgtgaagaaggttaaaaatcctgatgcacaacaggccattttccaggagatggcgaaagagattgaccaggcggcagggaaagtcctgctgcgtgaagcggcacgaccggaaattacttatcctgacaatttaccggttagtcagaaaaaacaggacattctcgaagcgattcgtgatcaccaggtggtgatcgtcgccggggaaacgggttctggtaaaacgactcagttaccgaaaatctgtatggagctggggcgcgggattaaaggactgatcggccatacccagccgcgtcgtctggcggcaagaacagtggcgaaccgtattgcggaagagctgaaaacggagccgggcggttgcatcggttacaaagtgcgtttcagcgatcacgtaagtgataacacgatggtcaagctgatgaccgacggtatcctgctggcggagatccagcaagaccgcctgctgatgcagtacgacactatcattattgacgaagcgcacgaacgcagcctgaatatcgattttttgctcggctatttgaaagagttgctgccgcggcgtcctgacctaaaaatcattatcacttccgcgactatcgacccggaacgcttttcgcgccactttaataatgcgccgattattgaagtctccggtcggacctatccggtggaagtgcgctatcgcccgattgttgaagaagccgatgacaccgagcgcgatcagttgcaggcgatttttgacgccgtagacgaactgagtcaggaaagccatggcgacattctgatctttatgagcggcgagcgggaaatccgcgataccgccgatgcgctgaacaagctgaacttacgccataccgaaatcttgccgctttatgcgcggctttcgaacagcgaacaaaatagggtattccagtcgcacagcggacggcgcattgtgctggcgaccaacgtcgcggaaacgtcgctgaccgtaccggggattaaatacgttatcgaccccggtacagcgcgtatcagccgctacagctatcgcaccaaagtgcagcgtttgccgattgagccgatttcccaggcgtctgccaatcagcgtaaaggccgctgtggtcgtgtgtccgaagggatctgtattcgtctctattccgaagacgatttcctctcgcgcccggagtttaccgatccggagattctgcgtaccaacctggcctcggttattttgcagatgaccgcgctggggctgggcgatatcgctgcgttcccgtttgtcgaagcaccggataaacgcaatatccaggatggcgtgcgtctgctcgaagagctgggcgcgatcaccactgatgaacaggccagcgcctataaactgacgccgctcggtcgccagctctcgcagttgcctgtcgacccacgtctggcgcgtatggtgctggaagcgcaaaaacatggctgcgtgcgtgaggcgatgattatcacgtccgcgctctccattcaggatccgcgcgaacgtccgatggacaaacagcaggcatcggacgaaaaacatcgtcgcttccacgacaaagagtctgactttctcgcgtttgtgaatctgtggaattatcttggcgagcagcaaaaggcgctttcttccaacgccttccgtcgcctgtgtcgtaccgattatctcaactatctgcgcgtgcgcgaatggcaggatatctacacccagttgcgtcaggtggtgaaagaacttggcattccggttaacagcgaaccggcggagtatcgcgaaattcacattgcgttgctgaccggtttactttcccatatcggcatgaaagatgccgataaacaagaatataccggcgcacgtaacgcgcgtttctccatcttccccggttctggtttattcaaaaaaccgcctaaatgggtaatggtggcggaactggtagaaaccagccgcctgtgggggcgcattgctgcgcgtatcgacccggaatgggtggagccagttgctcagcatttgattaaacgcacctacagcgaaccgcactgggaacgggcgcagggcgcggtgatggcaacggaaaaagtcactgtttatggtttgccgattgttgccgcgcgcaaggtcaactacagccagatcgatccggcgttatgtcgtgaactctttattcgccacgcgctggtggaaggtgactggcagacgcgtcacgcattcttccgtgaaaacctgaaactacgggcggaagtagaagagctggaacacaaatcacgtcgccgcgatattctggttgatgacgaaacgttgtttgagttctacgaccagcgcatcagccacgatgtaatctccgctcgccacttcgacagctggtggaaaaaagtcagccgcgaaacgcctgatttgctcaactttgaaaaaagcatgttgatcaaagagggcgcagaaaaaatcagcaagctggattacccgaacttctggcatcagggcaatctcaagctgcgtttgagctatcagtttgagcccggcgcggatgctgacggtgtgaccgtacatattccgctgccgttacttaaccaggttgaggaaagcgggtttgaatggcagatccccggtctgcgccgcgaactggtgattgctctgattaaatcgttgccgaaaccggtacgccgtaattttgtacccgcgccaaactatgccgaagcgtttttaggccgcgtcaaaccgctggagttaccgttgctcgacagccttgagcgcgagttacggcggatgaccggcgttaccgttgaccgcgaagactggcactgggatcaggtgcccgatcacctgaaaattaccttccgcgtggtggatgacaaaaacaagaagctaaaagaagggcgctcgctacaagatctgaaagatgcgctgaaaggcaaagtgcaggaaacgctatctgcggtggcggatgacggtatcgagcagagcggcttacatatctggagttttggtcagctgccggaaagctacgaacagaagcgtggcaactacaaagtgaaggcgtggccggcgctggtggatgagcgcgacagtgtggcgatcaaactgtttgataacccgctggagcaaaagcaggcaatgtggaacggtcttcgccgtctactgctgctgaatattccatcgccaatcaaatatttacatgaaaagttaccgaacaaagccaagctgggactgtactttaacccgtatggcaaagtgctggagctgatcgacgactgtatctcctgcggtgtggataaattgatcgacgccaatggtggcccggtctggacggaagaaggctttgctgcgctgcatgaaaaagtgcgtgccgaactgaacgacacggtggtggatattgcgaagcaggtcgagcaaatccttacggcagtgttcaatatcaacaaacgtctgaaagggcgggtggatatgaccatggcgctggggctttctgacattaaagcgcagatgggcgggttggtatatcgcggttttgtcactggtaacggcttcaaacggctgggcgacacgctgcgatatttgcaggcgattgaaaaacggctggaaaaactggcggttgatccacatcgcgaccgtgcgcagatgctgaaagtcgaaaacgtccagcaggcgtggcagcaatggatcaacaaactgccgcccgcacgtcgtgaggatgaagacgtgaaagagatccgttggatgatagaagagttgcgcgttagttacttcgctcaacaacttggtacgccttatccgatttcagataagcgtattttgcaggcgatggagcagattagcggttaaccctgctatttgcctgataaagaaaaaacccggtaagcatttagcgccgggttttttattaattctaaaacggtaagggtaaaaattcaggaattcagaaaaatacaattctctgctgcaagatgaataatgtttatctacagcatttccttaaaagatatgtcaggcttgcggagtggcggttaaggacatacgatttcctcctttcagagtgctccgcttctcactattatctcacgcagtattcttaagggaacgataaggaggaaccatgaacattaccccgtttccgacgctttcgccggcaactatagatgccataaatgttatcggacagtggctggcgcaggatgatttctccggtgaggtgccgtatcaggccgattgcgtgatccttgcaggcaatgcggttatgccgactatcgatgcggcatgtaagattgcccgcgatcagcaaattcctttactgattagtggtggtatcggtcactcgacaacttttttgtatagcgccatcgcacagcatccgcactacaacactatccgcaccactggcagagcagaagcgaccatcctggcggatatcgctcatcagttctggcacattccgcatgaaaaaatctggattgaagaccagtcaacaaactgcggtgaaaacgcacgctttagcatcgcgctattgaatcaggccgtagaacgagttcatacggctatcgttgttcaggaccccaccatgcagcggcgcacgatggcgacgttccgccgtatgactggggacaatcccgatgcaccacgctggttaagttatcccggattcgttcctcagttaggaaataacgcagacagtgtaatctttattaatcagttacaaggattatggccagttgagcgttatctctcactactcactggcgagctgccgcgtttacgcgatgatagcgatggctacggtccccgcgggcgagattttatcgttcacgttgattttccggcagaagtcatccatgcatggcaaacgctgaaacatgatgcggtgctcatcgaggcgatggaaagtcgctcgttacgttaaaaattgcccgtttgtgaaccacttgtttgcaaacgggcatgactcctgacttttatttctgccttttattccttttacacttgtttttatgaagcccttcacagaattgtcctttcacgatgccgtctctctgatgattgatgttaattaacaatgtattcaccgaaaacaaacatataaatcacaggagtcgcccatgtcagtacccgttcaacatcctatgtatatcgatggacagtttgttacctggcgtggagacgcatggattgatgtggtaaaccctgctacagaggctgtcatttcccgcatacccgatggtcaggccgaggatgcccgtaaggcaatcgatgcagcagaacgtgcacaaccagaatgggaagcgttgcctgctattgaacgcgccagttggttgcgcaaaatctccgccgggatccgcgaacgcgccagtgaaatcagtgcgctgattgttgaagaagggggcaagatccagcagctggctgaagtcgaagtggcttttactgccgactatatcgattacatggcggagtgggcacggcgttacgagggcgagattattcaaagcgatcgtccaggagaaaatattcttttgtttaaacgtgcgcttggtgtgactaccggcattctgccgtggaacttcccgttcttcctcattgcccgcaaaatggctcccgctcttttgaccggtaataccatcgtcattaaacctagtgaatttacgccaaacaatgcgattgcattcgccaaaatcgtcgatgaaataggccttccgcgcggcgtgtttaaccttgtactggggcgtggtgaaaccgttgggcaagaactggcgggtaacccaaaggtcgcaatggtcagtatgacaggcagcgtctctgcaggtgagaagatcatggcgactgcggcaaaaaacatcaccaaagtgtgtctggaattggggggtaaagcaccagctatcgtaatggacgatgccgatcttgaactggcagtcaaagccatcgttgattcacgcgtcattaatagtgggcaagtgtgtaactgtgcagaacgtgtttatgtacagaaaggcatttatgatcagttcgtcaatcggctgggtgaagcgatgcaggcggttcaatttggtaaccccgctgaacgcaacgacattgcgatggggccgttgattaacgccgcggcgctggaaagggtcgagcaaaaagtggcgcgcgcagtagaagaaggggcgagagtggcgttcggtggcaaagcggtagaggggaaaggatattattatccgccgacattgctgctggatgttcgccaggaaatgtcgattatgcatgaggaaacctttggcccggtgctgccagttgtcgcatttgacacgctggaagatgctatctcaatggctaatgacagtgattacggcctgacctcatcaatctatacccaaaatctgaacgtcgcgatgaaagccattaaagggctgaagtttggtgaaacttacatcaaccgtgaaaacttcgaagctatgcaaggcttccacgccggatggcgtaaatccggtattggcggcgcagatggtaaacatggcttgcatgaatatctgcagacccaggtggtttatttacagtcttaatgagtgaaagaggcggaggttttttcctccgcctgtgcgcgtcagagtttagcgaatttttcgagggtgcgaataagctgtgtgacgaagccatattcgttatcgtaccaggcgaccgttttcaccagttgtaaatcgcccacggcggtaatttccgtttgcgtggcatcaaacaccgaaccgaaatggctgccaatgatatcggaagagactatttcttcatcggtataaccaaatgactcgttattggtggttgcttgtttaagtgcgttattcacctcttcggcagtcacttttttccgagaatcgataccagttcagtgaccgaacctgttttcaccggcacgcgttgcgcatgacctttcagtttgccgctcagttccgggatcaccagaccaatggcttttgccgcccccgtagtgtggggaatgatattttctgccgctgcgcgtgaagcacgtaaatctttaccacgcgggccatccaccagtgactgggtgccagtataggcatgaatggtcgtcatcgtgccgacttctatcccgaaactgtcatgcaaggctttggccatcggcgcaagacagttagtggtgcatgacgccacggaaacaatggtgtcgttgccatccagagtgtcgtcattgacgttataaacgatagttttcatttcaccggcaggggcggaaatcaacaccttcttcgcaccagcatcaagatgcgcctgcgatttctcggcggaggtataaaagccagtacattcgacaatgatttctgcacctttcgctttccacggaatatttttagcctctttttcggcgtaaaccgcgatacttttcccatcaatgataagtgaatcttccgtaaaatcaacgctccaggggaatggtccgtagtttgaatcatgtttcagcaggtaggcgagaatttatggggaagtgagatcattaatagcgacaacgtctatgttgcttttgacttcaagtaatcgacccaacaccagtcgaccgatacgaccaaaaccgttaataccaactttactcatggttttctcctgtcaggaacgttcggatgaaaattgatcctttccaggcttagaccaggatggcgggatgggcaatctccattctcacagtgaaacgtaacgtactgaaaacgggtgaacaatatttaatgaaattttgagaaaagcccgttatgttaacggaaaattatgttaaagcaggaaatgttatggaaaataaatattcaaggttacaaatcagcattcactggctggtctttttactggttatcgcagcgtattgcgcaatggagtttcgtggtttcttcccacgtagcgatcggccactcatcaacatgattcatgtttcctgtggcatctcaattctcgtgctgatggtcgttcgtcttttgttaaggctgaaatacccaaccccgccgattatacctaagccaaaaccgatgatgacgggactggcgcatttgggacatttggtgatttatctcctgtttattgcgctgccagtgattggtttggtgatgatgtataaccggggcaacccgtggtttgcgtttggtttgacgatgccttacgcttcagaggccaatttcgaacgggtagatagcttaaagtcgtggcatgaaacgctggcgaatctgggatattttgtcatcgggttgcacgctgcggctgcactggcacaccactatttctggaaggacaacacacttctacgcatgatgccgcgtaaacgttcctgaaggatatttaaagaaaacgcctgtactaaaaccgacccgtggtacaggcgaagaatacgggtctacatcggaagcgcctattatatttatttgtatgataaataaaaccataatccttgcccatacgtccatctggcttatttttaatcaattcacccgatctttgatctcatcaacggtatcaaaataaaccagcgtataacgttcaaatcgaacataagattcgataaaccatggaggttatatgaaaaaactggcacttattttgtttatgggaacgcttgtttccttttatgccgatgccgggcgcaaaccctgttctggttcgaaaggggggatctcacactgtacggcaggcggcaaatttgtctgtaatgatggttctattagtgcatcgaaaaaaacatgcactaactgaagtgtaaaaggggtgccatgagaaaatgaatctgctagtcaaatgcgcggggaaaatccccgcgcttgcccttacctggacgtgcaggccatgagcgcagcaacctccttatcaccgtcccggaaccgcagttcgtagagcgtttgtcgggtcaggagtgtgaatgtcagaatcgtaatgcagataatgagcagacacaccaccagagggttgtgcttcatagcctttctccttgccggatggcgggtaagaggctaagatctgaattgctaggttcattcgttggcctcggttgatagaaatatcggtcggggccttcgtctttctgattcccggttagcctgaaaacagaaagtctcaggcacccgcaggcatcctatgaggtttccttagggacgaaaataatcacttcacgaaattgcgtgctgttttccagaatttttcgtcattcgggttagccagtttagccattcgttactctcttcattccaatagcattaattttctatgcaataattgttgtaaaaatgtgacgcaaagaggtttttggtcataagtaattaccgtcaagtgccgatgactttctatcaggagtaaacctggacgagagacaacggtaatgaatacaactccctcacagcgattaggttttttgcatcacatcaggttggttccgttatttgcctgcattctaggcggtatcttagttctattcgcattaagttcagccctggctggctatttcctctggcaggccgatcgcgatcagcgtgatgttactgcggagattgagattcggaccgggttagcgaacagttcagattttttgcgttcagcccggatcaatatgattcaggccggggctgcgagtcgtattgcggaaatggaagcaatgaagcgaaatattgcgcaagccgaatcggagattaaacagtcgcagcaaggttatcgtgcttatcagaatcgaccggtgaaaacacctgctgatgaagccctcgacactgaattaaatcaacgctttcaggcttatatcacgggtatgcaacctatgttgaaatatgccaaaaatggcatgtttgaagcgattatcaatcatgaaagtgagcagatccgaccgctggataatgcttataccgatattttgaacaaagccgttaagatacgtagcaccagagccaaccaactggcggaactggcccatcagcgcacccgcctgggtgggatgttcatgattggcgcgtttgtgcttgccctggtcatgacgctgataacatttatggtgctacgtcggatcgtcattcgtccactgcaacatgccgcacaacggattgaaaaaatcgccagtggcgatctgacgatgaatgatgaaccggcgggtcgtaatgaaatcggtcgcttaagtcgtcatttacagcaaatgcagcattcactggggatgacagtagggactgttcgacagggcgcggaagagatttatcgtggcaccagcgaaatttcagctggcaatgcggacctgtcatctcgcaccgaagaacaagcggcggctatcgaacaaactgccgccagcatggagcaactcactgcgacggtgaaacagaatgcggataacgcgcatcatgccagcaaactggcgcaagaggcttctattaaagccagcgatggcgggcagacggtttccggtgtagtaaaaacgatgggcgctatctccacgagttcgaagaaaatttctgagatcaccgccgtcatcaacagtattgctttccagacgaatattctggcactgaatgctgccgttgaagccgcgcgagcgggtgagcaagggcgtggatttgccgttgtcgccagcgaagtacggacactcgcaagtcgcagcgctcaggcggcgaaagagattgaaggcttgatcagtgaatcagtcaggttaattgacctggggtcggatgaggtggcaacggccgggaaaaccatgagcactattgttgatgccgtcgcgagtgtcacacatatcatgcaggaaatcgccgccgcctcggatgaacaaagtagaggcataacgcaggttagccaggcgatttctgaaatggataaggtgacgcaacagaatgcttctctggtagaagaggcctcagcggcggcggtgtcccttgaagaacaggcggcacgattaactgaggcggtggatgtattccgtctgcacaaacattctgtgtcggcagaacctcgcggagcgggtgaaccagttagtttcgctacggtgtgaaaatgttcaaggagggatcgacagatcccttcacctttcagaacggcattgattttcgaatagcgttaatcatcaactggcaaccagaagagaacgtcgcatctacgcgggtcagtattccaatcggttcgcctgcaccatgtcccggaacaggcagggccaccagcgtggcatgacgcaggtcgtcttttacagcgccagaagggacaaaccacacgtaatcgtattcaaccgtaagttgacgagatagcgaagcagacagcgtttcgatacaacccgaaggaattttacagccctggctctgcactaatgcatctgaatgctggcgtggcgcagtaccttctggtgatacaacgaccggccattccagcacccggcttagcgttacgttctcctgaagtagcgggtgattagggcggacaaccagcttcaacgattcaagaaacagcagttcgtaattaagcccggtcatcagttcaggatctgacatccgaccaatgccgatatcgatttccccggtttttaaacccgccagaatcatagggttactcattgtcgcaacttgcaaggtcgtctctttttgttgctgatgaaactgacctataaccgaaggtaatatccccagtgccgcagtaggtagtgcaccaaccctgacgacatcattattaagaccttctttacgatgaagcgaccgtccggcagtgttgatggcgtcaagaactctgactgcatgcgttaaaaattgttcgccgggtaaggtaagttgcgccccctgacgaccacgctcaaacaagcgagcgccagtcagctgctccagttcattcaatgtcttagagagcgcaggttgactcaaattaagggtttcagccgcgcgccccaaagttccttgttgtgcgacagctacgaatgtatgaaggtggcgcaaacggatgcgctgactaaacagactatttttttccataagcgatgttaaaaacgaagcggtgtcgctgacaagtgaagttgtttgattatgataacttgattgcaaaatattattaacaattaaagcaattatgttacagcaaaatggataatattgatgttttcgcggcgagatcacagtttgtaaattcttcccgcaagagtgaatgcggttacctacactccagattactgaccactggaggcagacactatggcgaacagcatcacggcggatgagattcgggaacagttttcgcaggcaatgtcagccatgtaccagcaagaagttccgcaatatggcacgctgctggaactggtagctgatgtgaatctggctgtgctggaaaacaatcctcaactgcacgaaaaaatggtaaatgcagacgagctggcgcgactgaatgttgaacgtcatggggcgattcgcgttgggactgcacaagagcttgctactcttcggcggatgtttgccattatggggatgtacccggtgagctattacgatctctcgcaggcaggggtgccggtacattcgacagcatttcggcccattgatgatgcttctctggcgcgtaatcccttccgcgtttttacctccttactccgccttgagcttatcgagaacgaaattttgcgccagaaagcggcggagattctgcgtcagcgcgatatcttcaccccacgttgtcgacaactgttagaggaatatgagcagcagggcggttttaacgaaacacaggcacaggagtttgtgcaggaagccctggaaacgtttcgctggcaccagtcagcaacggtagatgaagaaacctatcgcgcattgcacaacgaacatcggttgattgctgatgtggtctgttttcctggatgccatatcaaccacctgacgccacgtacgctggatattgaccgggtgcagtcgatgatgcctgaatgcggaattgaacccaaaattctcatcgaggggccgccgcgccgcgaggtaccgattttactacgccagaccagctttaaagcactggaagagacggtgttgtttgcggggcagaaacagggcacgcataccgcgcgctttggtgaaattgagcagcgtggcgtggcattaacgccgaaagggcgacaactgtatgatgatcttctgcgtaacgctggaaccgggcaggataatctcactcaccaaatgcatttacaggaaaccttccgcacttttcctgacagtgagtttttaatgcgtcagcaagggttggcatggttccggtaccgtctgacgccttcgggtgaggcgcatcgtcaggcgattcatcctggagacgatccacagcccttaattgaacgtggttgggtagtggcgcaacccatcacctatgaagatttcttgcccgttagcgcggcggggatcttccagtcaaatctgggtaatgaaacgcagacacgcagtcacggtaatgccagtcgcgaagcatttgagcaggcgttgggttgtccggttttggatgagttccagctttaccaggaagcggaagaacgcagtaaacgtcgctgtggtttgctttaaaatctgaccatccgcctttgcaaaaatttgcctgattttacaaacgaatcaggctcatcccatcgacataaaaaaaatgccgatttatgcatattctctcagttcaacaattggattattaataaatattgtctagagtgagcggtcataaataagcactttcttgccgctgaaaacgaccagcgcgggaccattcacaacaccagaaggactcactttcaggtatggatcgtagacgatttattaaaggttcaatggctatggccgccgtgtgcggtaccagcggcattgcttctcttttttctcaggcggcattcgcggcagattctgatattgccgacgggcaaacccagcgttttgacttctccattctacagtcaatggcgcacgacttagcgcaaacagcgtggcgtggtgcgcctcgtccgttacctgacacgctggcgacaatgacgccgcaggcttataacagtattcaatacgacgccgaaaaatcgctctggcataacgttgagaaccgtcaactggacgctcagttcttccatatgggaatgggattccgtcgccgcgttcgtatgttttctgtagatccagcaacacatctggcgcgtgaaattcactttcgcccggagttgttcaaatacaacgatgcaggtgttgatacaaaacaattagaagggcaaagcgatctcggctttgccggttttcgcgtgtttaaagcccccgaactggcgcgccgtgatgtagtatcatttctcggcgcgagttatttccgcgccgttgatgatacatatcaatacggtttgtcggcccgcggcctggcgatcgacacttacaccgacagtaaagaagagttccccgactttaccgccttctggtttgatacggtaaaaccgggggcaactacctttaccgtttatgcgttgctcgatagcgccagcattactggtgcctataagttcactatccattgtgagaaaagtcaggtgattatggatgtggaaaatcacctgtatgcgcgcaaagacattaaacagctgggcattgcgccgatgaccagtatgttcagctgcggtactaatgaacgtcggatgtgcgatacaattcatccgcaaattcatgactctgatcgtctgtccatgtggcggggcaacggcgagtggatttgccgtccgctgaataatccgcaaaaattgcagttcaatgcttacaccgacaacaacccgaaagggtttggtttattgcaactggatcgtgacttctcccattatcaggacattatgggctggtataacaaacgcccaagtctgtgggtggaaccgcgtaacaagtggggtaagggcaccatcggcctgatggaaatcccaacaacgggcgaaacgctggataacattgtctgcttctggcagccagaaaaagctgtaaaagcaggtgatgagtttgcattccagtatcgtctgtactggagtgcgcaaccgcctgttcattgcccattagcgcgcgttatggcgacgcgtaccggcatgggcggtttctcggaaggttgggcgccaggtgaacactatcccgaaaaatgggcgcgtcgttttgccgtcgatttcgttggtggtgatctgaaagctgccgcgccaaaaggcattgagccggtgattacgctttccagtggggaagcgaagcaaatcgaaattctctatattgaacccatcgatggttatcgtattcagtttgactggtatccgacttcggactccactgatccggtcgatatgcggatgtatctacgttgtcagggggacgctatcagtgaaacatggctgtatcagtatttcccgccagcgccggataaacgtcagtatgttgacgaccgcgtgatgagttaatcgttttttcttcggcaccttcttcgggaggtgccgtctggttaaacacgatcccgctcgcatttttccctaagttaaatgagtaatctgatggtgtgtatttcagatacaccttgtcagccactaacagggagtgcgtatgtttccagaataccgagatttaatatcccgtctgaaaaacgaaaatcctcgctttatgtccttgttcgataaacacaataaacttgatcatgaaattgccagaaaggaaggttccgacggtcgagggtacaatgcggaagtggtccgcatgaaaaaacaaaagctacagttaaaagatgagatgctcaaaatcctgcagcaggagagcgtcaaagaggtgtaaactttcctaagccgccagccaggcggcttttttaacaactgcatggattgactggagataagatgactgaaacgataaaagtaagcgaatcacttgaattacatgctgttgcagaaaatcacgtcaaacctctttatcagttaatctgtaaaaataaaacctggttacagcagtcgctaaactggccgcagtttgttcaaagtgaagaggacacgcgaaaaacggtgcagggtaatgtgatgttgcatcaacgcggctatgccaaaatgttcatgattttcaaagaagatgaacttatcggcgttatctcgtttaatcgtattgaaccactgaataaaaccgctgaaataggctactggctggacgaatctcatcaggggcaggggatcatttctcaggcgctgcaggcattgattcatcattacgcccagtctggtgaacttagacgcttcgtgatcaaatgtcgggtggacaatccgcaaagcaaccaggtcgctttgcgcaatggttttatccttgaaggttgcctgaaacaggctgagttcctgaatgatgcctatgatgatgtgaacttatacgcgcgtattatcgattcacaataaccctgccagcggcgttcgcgtaatgcgctcctcgccgttaatgacttttggaccacggacatgaaccgtgtcgccatcaaaggcttcaacgacggcgtggtcggttaactccacatggttttcaattatcaccgcacctgtaatacggctctcaccttgtatgacaacgtgctcgtcgagcagaatcggtccgccacgtaccacggcatttccgccaaccaagacatgatgttttaacacacaattaccttccacaatggcatattccgccacctgcgaactgtaatgaatcgtcggaatggcatcttcttctatgccagctttcacctgcgcgtgaccgtagactttagcgcaatcgcatagccagacattgttctcttcattaccttcaatactggcaaaatcaaaaacttcggcgcgatgttcaataaaagcataccggacgacggcatcgccataaatttgtgcctggtggacaatacgcgaggcgctaacccttgcgcgatcataaatttggagcaggagttgatggtcgggcgttaagccttgtgcggcgacgatcatagaatgttgatcaattaaggcgtgaccaaatattctacattgcccgtaaactaatgagtcatgaatggtgacgctgtcacttatatatgcaccctggctgatttcactattatcgatccagacgttatccgttgcgtaaacctctccccacagcacgctggtgccggtgatacgcgtattaccggaaatcaccgctccgccgaacgcaatagcattctggtcgtaaatccagcaatttccttcttgtgctaacaccgtttcgcgatcgatccagccgccagcggttcctgctatcacatcgttaaaatcgctaatggcgataatctgccgtaataacacattttttttagtgccatcttcctgataactaaaggctcgctgttcttcacttagacgatatttgcgcatagcgttttcccacaggtgacttactataaccgtagcaaattctgcggctctggctatgctcgagaaaattccataaaatgcatttcaaatatactttataaattaaacaaaatgagtaagaagatgcagagcgataaagtgctcaatttgccggcaggctactttggtattgtgttggggacgatagggatgggatttgcctggcgctatgccagccaggtttggcaggtcagccactggttaggggatgggctggtgattctggcgatgatcatctggggattattgactagcgcatttattgcccgactcatacgctttccgcatagcgtgctggcggaagttcgccatccagtgctgagcagttttgtgagtttgtttccggcaacgacgatgctggtggcgattggttttgttccgtggtttcgcccactggcggtgtgcctgttcagttttggtgtcgtggttcagttggcttatgccgcctagcaaactgcgggattatggcgcggatctcaccctgaagaagctaccacgcctggactgtatctgccgacagttgccaacaactttatcagcgcaatggcctgtggtgcgttgggctacaccgacgccggtctggtgtttttaggcgcaggcgttttctcatggctaagccttgaaccggtgatcttgcagcgtctgcgcagttcgggagaattacccacggcactgcggacatcactcggcattcagctcgctcctgcgctggtggcttgtagtgcctggctgagcgtcaacggcggcgagggtgacacgctggcgaaaatgcttttcggttatggactgctgcaactgctgtttatgctacgtctgatgccatggtatctctcccagccatttaatgcttcattctggagtttctcgttcggcgtatctgcactggcaaccaccggtttgcatctggggagtggcagcgataatggatttttccatacgctggcggtgccgctgtttatctttaccaattttattattgcaatactgctcatccgtacttttgcgcttctgatgcagggaaaattgttagtcagaaccgagcgcgccgttttaatgaaagcagaggacaaagaatgatcattcgtgacgaaaactattttactgataaatatgaattaacccgcacacactctgaagtactggaagcggtgaaagtggttaaaccgggtaaaacgctggatctgggctgtggcaatggtcgtaacagtctttacctggcagccaatggttatgatgttgacgcatgggataaaaatgccatgagtatcgccaacgtcgagcgcattaaatccattgaaaatctggataatttacacacccgagtcgttgatctgaataacctcacatttgatagacagtacgattttattctttcgactgtggtgctgatgttccttgaggctaaaaccatccccgggttgattgccaatatgcaacgttgcactaaacctggtggttacaacctgattgtggcggcgatggataccgctgattatccatgtaccgtcggcttcccgtttgccttcaaagagggagaattacgtcgatattacgaaggctgggagagggtgaaatacaatgaagacgtcggcgagctgcaccgcaccgacgccaacggtaatcgtattaaactgcgtttcgccacgatgctggcacgtaaaaaatgacccggtaagcacaaaacgcgtgaaaattccccacgctgagatgatttactgttcttcttttcggtaagcatattttttatcgaagggatgtgaaattaatcacagtagtcgaagtttttagcagcttaacttactgaaatttaagtactgatgattgacttagcccctttttcggcattgactatgtcgtctgaaaaggggctgaaaaatttattttcaccaacactttttttgccacaacacgaagcggcgctttttgctataacttagaaagtaatataatcatctcaggaaactattcatgcgtaccacatcatttgcgaaagttgcagctttatgcggcttattggctctgtctggttgtgcctctaaaatcacccagccagataaatattctggttttttaaacaattactctgatttaaaagaaacaacctcggctacaggtaaacctgttttacgttgggtagacccgagttttgatcaaagcaaatatgacagcatcgtctggaacccaatcacttattatccggtaccgaaaccgtcgacccaggtagggcagaaagttctggataaaattttgaactataccaacaccgaaatgaaagaagcgatagcgcagcgtaaaccactggttaccaccgctgggccgcgtagtctgattttccgtggggccattaccggtgtagataccagcaaagaagggctgcaattctatgaagtggttcctgttgcattagtggttgcggggacgcaaatggctacaggccaccgtaccatggatactcgcctctattttgaaggtgagctgattgatgcagcgactaataaaccggttatcaaagtcgttcgtcagggcgaaggtaaagacctgaataacgaaagtacgccaatggctttcgaaaatattaaacaagttattgatgacatggcgaccgatgccaccatgtttgacgttaacaaaaagtagttccagacgcgccatcgttagatggcgctttttatccggtgcgccgtaaaaccccatccttcagggcggggatataaggcgcggttttccacctgaccaggtgtttgctgttgttcaatgtattggcggatgacggatattggcgcacctccgcagctactggcaaaatagccaggactccacaaaacgcctttgtagtaatacctgaatgcaatatctggtcgatctcgtcgcagtcacctacccgatacgcctttgaggctgtttaccagactggatatcgccagtttgggaggatagttaattaacaaatggacgtgatctggttcgccatccatttcaaccagttcagcttcaaaatcagcacatacatttgaaaagtaagtgcgtagtttttctgtcgcgtcatggtcaaaaatctggcgtcggtatctggtgacaaagagcaggtgaacatgcatcaggaaaacacaatgccttccacgccggatatcggtttcttttttcacagaccaaagtatcatttgacctgtgaaacgattacaggcatttaaattccagttaagacccggtggtcaacaggagtgtgaaatgaggcgcttcgcaggcgcatgtcgtttcgttttcaatcgtgctctggcacgtcagaatgagaatcatgaggccggtaataaatacatcccttacgggaaaatggcttcctggctggttgagtggaaaaatgccactgaaacgcaatggcttaaagattctccctcacagccattgcaacagtcactgaaagaccttgagcgggcttacaaaaacttcttccggaagcgggctgcttttccccgattcaaaaagcggggacagaatgatgcattccgctacccgcagggcgttaagctcgatcaggaaaacagccgtatttttctgccgaaactgggctggatgcgctaccggaacagccgtcaggtcacgggtgttgtgaaaaatgtcactgtcagccagtcctgcggtaagtggtacatcagtattcagacagaaagtgaagtatcaactccggttcacccttcagcatcaatggtcgggctggatgctggcgtggctaaactcgccacgctgtcagatggcacagtctttgagcctgtaaacagttttcagaaaaaccagaagaagctggcgagacttcagcgacagttaagccgcaaggtcaaattcagcaacaactggcaaaagcagaaacgcaaaatacagcgactgcattcctgtatcgcaaatatccgcagggactaccttcacaaagtcacaacggccgtcagcaaaaaccacgcaatgatagtcattgaggatttgaaggtcagcaacatgtcaaagtcagcagcgggtacggtcagccagccggggcgcaatgtccgggcaaaatcaggtttaaaccgttcgatactggatcagggctggtatgaaatgcgccgccagcttgcgtacaagcagctctggcgtggcggtcaggtgcttgctgttccgccagcgtatacaagccagcgttgcgcgtactgtggtcatacagcgaaagagaaccgcctgtcacaaagtaaattcagatgccaggtatgtggatatacagcgaacgccgatgtaaatggcgctcgcaacattttagcggcggggcacgccgttcttgcctgtggagagatggtgcagtcaggccgcccgttgaagcaggaacccaccgaaatgattcaggcgacagcctgaacgtagcagggatccacgtccttcagggcgtggaggatgtcaatatcggtttctgtcagcgattaaattcaacaccacgtaacaaacgcctccggcaattaatccccaaaacgcagaaccaatcccgaccagcgtcaatccacttgccgttaccagaaatgccaccaccgccgcgtctcgctcacgctcattatgcagcgcctgatacaaactgccgccgatggtacttaacagcgccagacctgccagcatctggatccaacttacgggcagggcagccatcatcccggtaatggcactaccaaacagacctgcgagcaaatagaaaatgcctgcaacggcagcggccagccaacgttgatctttatccggatgcgcttccgggctttggcaaatagccgcggtgattgccgcaataccgacggaataaacgccgaaaggggaaaaaaccagtgccagcaatccagtaaatacaattaatggcgaaacaggagccgaatatccagctgctttcattgctgcgatacccggtgcgttttgcgatgccatcgtcaccagaaaaagggggagtgcaacgctcaggctgtgagcaaacgaaaaatcaggggtaatataagtggggagaacgggtttaaagacaacatcagttgtgacaacgtcaccttgcgcgatgacgatcacgatcccaataatcatcgcggcaattaccgcatagcgcggcgcaacggccttggttgccagccataccagcaacatacttccacacaacgtaaattgaccgtccagactggcaaacgcctgtaaaccaaagcgtaataaaatcccggcaagcattgccgccgcaagcgagtgcggaataatgcgcatcagacgagcaaagagtcccgttatgccgcagaggactattagcgcgttggtgacaataaaaacgccgatggcttcgttaagtgttagtccctgcaatccggtgaccaacaaagccgcgccaggcgttgaccatgcggtgagaacaggtacgcgataccataatgtcagagtcagcgtactgacgcccattgccagccccagcgccgtcatccagccagagatttgtgcagtggtggctccggcgacaatcgctgcttgccagattattgccgctgaactggcgtagccaattaataccgccagaaaccccgccagtagcgtgggtggaggaatagaaaacagacgcatagtcacctcgtgcgttatagcgtacaggcaccgtagcatttgtccgttataacgcacaagtgataaacttccgttttgccggaggagtcgcatggaaaatctcgctcgctttttatccaccacacttaaacaactacgccagcagcgcggctggagtctttcgcgactggcagaagcgacgggcgtttctaaagcaatgttagggcagattgagcgtaatgagtccagtccgacggtcgcgacattatggaaaattgccaccgggttgaacgtaccattttcaacatttatttctccgccgcagtccgctacgccttcagtttatgatccacaacagcaggcgatggtgatcacttcgctgtttccttatgatccacaactctgctttgaacacttctcgattcagatggcatctggtgcaataagcgaatcgacgccccatgagaagggggtaatcgaacatgtcgtcgtcattgatggacaacttgatctgtgcgttgatggggaatggcagacccttaattgtggggaaggcgttcgatttgctgcagacgtcacgcatatctatcgtaatggtggggagcaaaccgtacattttcattccctcatccattacccgcgcagttaagcgggaaaactatttcgcaacgtcgcgcttgtggctaaaatagccgccatttttcagctactggataagaatgtgaccgtatcttctcatcgacttgaactgttaagcccggcacgcgatgccgccattgcccgcgaagctattttgcacggtgccgatgctgtttatatcggcggccctggttttggtgcccgtcataatgccagtaatagcttgaaagatattgccgagctggtgccgtttgcccatcgttatggtgcaaaaattttcgtcacgcttaacaccattttgcatgatgatgagctggaacccgcgcaacggctgattactgacctctaccagaccggtgtcgatgcgctgattgttcaggatatggggattctggaacttgatattccgccgattgaactgcacgccagtacgcagtgcgacattcgtacagttgaaaaagcgaagttcctctctgatgttggcttcacgcagattgtgctggcgcgagagctgaatcttgatcagatccgcgcgattcaccaggctacggacgcgaccattgaattctttattcatggggcactgtgcgtggcctattcgggtcagtgctacatttctcatgcgcaaacagggcgtagcgccaaccgtggcgattgctcgcaggcgtgccgtttgccatacacattgaaagacgatcaggggcgggtggtttcctatgaaaaacatctgctgtcgatgaaagataacgatcagactgccaacctcggcgcgctgattgatgctggtgtacgctccttcaagattgaagggcgttacaaagatatgagctacgtgaagaatatcaccgcccattatcgccagatgcttgatgccattattgaagaacgtggcgatctggcgcgcgcttcatcaggtcgtactgaacatttctttgttccatcgacggaaaagactttccaccgtggtagcacagattattttgtgaatgcccgtaaaggcgatattggcgcgttcgattcgccgaaatttatcggcctgccggtaggcgaagtagtgaaagtggcgaaagatcatctcgatgttgccgttaccgagccactggcaaatggcgatggcctgaacgtgttgattaaacgtgaagtcgtcggttttcgtgccaatacggtcgagaaaaccggagaaaatcagtaccgcgtctggcccaatgaaatgccagcagatttgcacaaaattcgtccacatcacccactaaaccgtaatcttgatcataactggcagcaggcactgacaaaaacctccagcgaacgtcgggtggcggtagacattgaactgggcggctggcaggaacaactgattctgaccctcaccagtgaagagggtgtcagcatcacgcatacgctggacgggcagttcgacgaagccaataacgccgaaaaagcaatgaacaatctgaaggatggtctggcaaaactggggcaaaccctctattacgcccgcgatgtgcaaattaatttgccgggggcgctgtttgtaccaaacagtctgttaaaccagttccgccgtgaagctgctgacatgctggatgctgcgcgtcttgccagttaccagcgcggcagccgtaaaccggttgctgatcctgcgccggtttatccgcaaacgcatctgagtttcctcgcgaacgtatacaaccagaaagcgcgtgaattttatcatcgctatggtgtgcagctgattgacgcggcgtatgaagcacatgaagagaagggcgaagtcccggtgatgatcaccaagcattgtctgcgctttgcctttaatctgtgcccgaaacaggcgaaaggcaatatcaaaagctggaaggcgacgccaatgcaactggttaacggcgatgaagtattaacgctaaagtttgattgccgcccatgcgagatgcacgtcattggcaaaatcaaaaatcacatactgaaaatgccgttaccgggaagcgtagtggcatccgtaagtccggatgagctgctgaaaacattgccgaagcgaaaagggtaaaacgccagttttctggttactcacaacttattgaatctgcatgatattgcctgccgggtaaggcgttacgccgcatccggcatcaaatgactcaacgttgtcccgcttctggtttgcgcgatttttgccagtaaaaatgctcgcgcaaaccttccgccgactcttccgccacagcacgcaattcatcgctgtccgcttcatgacgcagctgatgatccacattctttacccacacaaattcatgtcctttgtgccctgccatgagttgtcctgaaaacagagcacacgttaataagacaaccgataacgccttcgtaaacatcctgccacctttttcttaccttttgccgctatgatgccgatcgtttcttgaggttattattcagttttgcaaattagcgcaaagaaattctggaatcttccttcctgattttgcattgcattctgccgttgcggcgatttagtgctattttcgagcaaattacacacggaggtaaacactaatgtttactttgttgatatactcagcggcagggaggcgatgtgaaacaaagcgagttcagacgttggctcgaatctcagggcgtcgatgtagcgaatggcagcaaccatttgaaactcaggtttcatgggaggcgcagtgtcatgccgcgtcacccctgcgatgagattaaagaaccattgcgtaaagcaatcctgaaacaactcggtttgagttaatcgccaattaaaaaggttaatgacatgcgagagacagtcgaaattatgcgttatcccgtcactcttacacccgcgccggaaggcggttatatggtttcttttgtggatatccctgaagcgttgacccagggcgaaactgtcgctgaagcgatggaagcggcaaaagatgctttactgaccgcatttgatttttattttgaagataacgagcttatccctttaccttcgccattaaatagtcacgatcactttattgaagtacctttgagcgtcgcctctaaggtattgctgttaaatgcttttttacagtcagaaatcactcagcaagagttagccaggcgaattggcaaacctaaacaggagattactcgcctatttaacttgcatcatgcgacaaaaatcgacgccgtccagctcgcggcaaaggcgcttggcaaagagttatcgctggtgatggtttaattacagttaacgaaaagttgtcatttttaacaactgatatagactgccgaatcatctgcacataattacgattcgataatgaaaaaataccagcagcttgcagaacaattacgcgagcagattgcgtcgggtatctggcaacccggcgatcgtttgccttcgttgcgtgaccaggtggcgctttcaggcatgagctttatgactgtcagccatgcctatcagttgctcgaaagtcagggatatattatcgcacgaccgcagtcgggttattacgttgcgccacaggcaataaaaatgccgaaagcgccagtcattccagtcactcgagatgaagcagtcgatatcaacacttatatttttgatatgttgcaggccagtcgcgatccgtcggtcgttccgtttgcctcggcctttcccgacccgcgacttttccccctccaacaactaaaccgctcgctggcgcaggtaagcaaaaccgccacagcgatgagcgtgattgaaaacttaccgccaggaaacgcagaactgcgtcaggctattgctcgtcgctatgccttacagggcatcaccatttctcctgatgaaattgtcattactgccggggcgttagaggcattaaacctcagtttgcaagcggtaactgaaccgggcgattgggtgatagtagagaatccttgtttctacggtgcgttgcaggcgctggagcggctacggctgaaggcgttatcggtggcgacggatgttaaagaagggatagatcttcaggcgctggaactggcgttgcaggagtatccggtgaaagcgtgctggctgatgactaatagccagaatccactcggatttaccttaacgccgcaaaaaaaagcacaactggtggcgttgctcaatcagtacaacgtaacgctgattgaagatgacgtttacagcgaactttattttggacgggaaaaaccgctgcctgcgaaagcgtgggatcgccacgatggcgttttgcattgctcttcgttttcgaaatgtctggtgcctggttttcgtattggttgggtcgccgccggaaaacatgcacgtaaaattcaacgcttgcagttgatgagtacgctttccaccagctcaccgatgcaacttgcgctggtggattacctttccacgcgccgatacgacgcccatcttcgtcgcctgcgtcgccagcttgcggaacgtaaacaacgtgcctggcaggcactgctgcgttatctgcctgcggaagtgaaaattcatcataatgacagtggttactttctctggttggagctccccgagccgttagatgccggcgaattaagcctggcggcactgacgcatcatatcagtattgcgccgggtaaaatgttttctaccggtgaaaactggtcacgttttttccgttttaataccgcgtggcagtggggagagcgtgaagaacaggcggtaaaacaattaggcaaacttattcaagaacggctgtaatagcgtttaatttaattcctcttagattgggtaatatgaatttcgaatagcagtcatatttcctaactccttgactatactccagaagataaccttacagacggcataatgcgcggtagctcacaacctgaataaattttctcaggggcgaaggtgtgcctgcaagccgccgtctatggttaaacaaggagatatttttacggcacggcggctgaacaattaattacgacaggagtaagaccttatgagcaagacatttgcccgcagcagcctgtgtgcgctcagcatgacaataatgaccgctcacgccgccgaaccgcctaccaatttagataaaccggaagggcgactggatattatcgcctggccgggatacatcgaacgcggacaaactgataaacaatacgactgggtaacgcagttcgaaaaagagacaggctgcgcggtgaatgtgaaaaccgccgcgacttccgatgaaatggtcagtctgatgaccaaagggggttacgatctggttacggcatccggcgatgcctcgctgcgtttgattatgggtaaacgcgtgcagccgattaataccgcattgattcccaactggaaaacgctcgatccgcgcgtggttaaaggcgactggtttaatgttggcggcaaagtttacggcacaccttaccaatgggggccgaacctgctgatgtacaacactaaaaccttcccgacgccgccggatagctggcaagtggtttttgttgagcaaaatctgccggacggcaagagcaataaaggccgcgttcaggcttatgatggccctatctatattgcggacgctgcgttgttcgttaaagccactcagccgcagttgggcatcagcgatccgtatcaactcaccgaagaacagtaccaggcggtgctgaaagtgctgcgcgctcaacacagtttgatccatcgctactggcatgacactaccgtgcaaatgagcgatttcaaaaacgagggtgtggttgcttccagtgcctggccctatcaggccaacgccctgaaagccgaaggccagcctgttgctaccgttttcccgaaggagggtgttaccggttgggctgataccaccatgctgcatagcgaagcgaaacatccggtttgcgcctacaaatggatgaactggtcattaacgccaaaagtgcagggcgatgtggcggcctggtttggctcgttaccggtagtgccggaagggtgtaaagccagtccgttattaggcgaaaaaggttgtgaaaccaacggttttaactatttcgacaaaatcgccttctggaaaacgcctatagcagaagggggcaagtttgttccctacagtcgctggacgcaggattacattgccattatgggcggtcgctaacttcgctggggtgctttatgacgtacgcagtggagtttgacaacgtctcgcggttgtacggtgacgtgcgcgcagtagatggcgtcagtattgcgataaaagatggtgagttcttctctatgctggggccgtccggctccggcaaaaccacctgcctgcgcctgattgctggcttcgaacagctttccggcggggctatctctatctttggtaaacccgccagcaatctgccaccgtgggagcgggacgtgaatactgtctttcaggactacgcgctatttccgcatatgtcgattcttgacaatgtcgcctatgggctgatggtcaaaggcgtgaataaaaagcagcggcacgcaatggcgcaagaggcgctggagaaagtggcgttggggtttgtacatcaacgtaaaccgtcacaactttctggtggtcagcgccagcgggttgctatcgccagagcattggtgaatgaaccgcgcgtattgctgttggatgaaccgctcggcgcactggatctcaaattgcgtgagcagatgcagctggaactgaaaaaactgcaacagtctctcggtatcacttttatcttcgttacccacgatcagggcgaagcgttatcgatgtccgatcgtgtggcggttttcaataatggacgcattgagcaggtcgattccccgcgcgatctctatatgcgcccgcgcacgccgtttgttgccgggttcgttggtacatcgaatgtttttgatggactgatggcagagaaactttgtggcatgacgggaagcttcgccctgcgaccggaacatatccgcctcaacacccctggtgaactgcaggccaatggcacgatccaggcggtgcaatatcagggcgcggcaactcgttttgaactgaaattgaacggcggtgaaaaactgcttgtgagtcaggccaatatgacaggcgaagaactgcctgccacgctcacgcccggacaacaggtgatggtttcctggtcgcgtgatgtgatggtgccgctggttgaggagaggtgaatggcgatgaatgtattgcaatcaccttcacgtccaggtctgggtaaggtgtccggtttcttctggcataatccggggctggggctgtttttactgctgcttggcccgctaatgtggtttggcattgtctatttcggctcgctgctgacactgttatggcagggattttatacttttgacgatttcaccatgtcggtaacgccggaactgacgctggcgaatatccgtgcgctgtttaatccggcgaattacgacatcattctccgcacgctgactatggctgtggcagtcactatcgccagcgccattctggcttttccaatggcgtggtatatggcgcgctataccagcgggaaaatgaaagcgtttttttatattgcggtaatgttgccgatgtgggcgagctacattgttaaagcctatgcctggacgttattgctggcaaaagatggcgtggctcagtggtttttacaacatcttgggctggaaccactgctgactgcgttccttacattacctgcggtgggcggaaatacgctgtcaacttccgggctggggcgctttctggtgtttctctatatctggttgccgttcatgatcctgcccgttcaggcggcgcttgagcgtttgccgccgtcattgttgcaggcgtcggctgatctcggcgcacgtccacgacaaacctttcgctatgtggtgctgccgctggcaatcccgggtattgccgctggctctatctttaccttctcactcacactgggcgattttatcgtcccgcagctggttggtcctccaggatattttatcggcaatatggtttattcccagcagggggcgattggcaatatgccgatggcggcggcattcaccctggtgccgattattctcatcgcactgtacctggcgttcgtgaaacgtctgggagcgttcgatgcactctgaacgcgcaccgtttttcctcaaactggcggcctggggcggcgttgttttcctacattttcccatcctgataatcgccgcctatgcgtttaacactgaagatgcggcgtttagttttccaccgcagggcctgacgctgcgctggtttagcgtggcagcacagcgtagtgatattcttgatgccgtgacactgtcacttaaagtggcggcgctggcgacattaattgcgctggtgttagggacgctggcagctgccgcgctgtggcgacgagactttttcggcaaaaacgccatttcgctgttactgctgctgcccattgcgctgccgggcattgtcactggtctggcgttattaaccgcctttaaaaccatcaatctggagccgggatttttcaccatcgtggtcggtcatgcgactttttgtgtagttgtggtgtttaacaatgtcatcgcccgttttcgccgcacctcctggagtctggttgaggcgtcaatggatcttggggccaatggctggcaaaccttccgctacgtagtgttgccgaatctcagttcggcgttactggcaggaggaatgctggcgtttgccttgtcgttcgatgaaatcatcgttacgacctttacggcaggtcatgaacgaacgttaccgttgtggttgctcaatcagcttgggcgaccgcgtgatgtaccggtaactaacgtggtggcactgctggttatgttggtaacaaccttgccgatcctgggggcctggtggctaacccgcgaaggcgacaatggtcaataaccactgatacaggaatatgctatgcaacataagttactgattaacggagaactggttagcggcgaaggggaaaaacagcctgtctataatccggcaacgggggacgttttactggaaattgccgaggcatccgcagagcaggtcgatgctgctgtgcgcgcggcagatgcagcatttgccgaatgggggcaaaccacgccgaaagtgcgtgcggaatgtctgctgaaactggctgatgttatcgaagaaaatggtcaggtttttgccgaactggagtcccgtaattgtggcaaaccgctgcatagtgcgttcaatgatgaaatcccggcgattgtcgatgtttttcgctttttcgcgggtgcggcgcgctgtctgaatggtctggcggcaggtgaatatcttgaaggtcatacttcgatgatccgtcgcgatccgttgggggtcgtggcttctatcgcaccgtggaattatccgctgatgatggccgcgtggaaacttgctccggcgctggcggcagggaactgcgtagtgcttaaaccatcagaaattaccccgctgaccgcgttgaagttggcagagctggcgaaagatatcttcccggcaggcgtgattaacatactgtttggcagaggcaaaacggtgggtgatccgctgaccggtcatcccaaagtgcggatggtgtcgctgacgggctctatcgccaccggcgagcacatcatcagccataccgcgtcgtccattaagcgtactcatatggaacttggtggcaaagcgccagtgattgtttttgatgatgcggatattgaagcagtggtcgaaggtgtacgtacatttggctattacaatgctggacaggattgtactgcggcttgtcggatctacgcgcaaaaaggcatttacgatacgctggtggaaaaactgggtgctgcggtggcaacgttaaaatctggtgcgccagatgacgagtctacggagcttggacctttaagctcgctggcgcatctcgaacgcgtcagcaaggcagtagaagaggcgaaagcgacagggcacatcaaagtgatcactggcggtgaaaagcgcaagggtaatggctattactatgcgccgacgctgctggctggcgcattacaggacgatgccatcgtgcaaaaagaggtatttggtccagtagtgagtgttacgcccttcgacaacgaagaacaggtggtgaactgggcgaatgacagccagtacggacttgcatcttcggtatggacgaaagatgtgggcagggcgcatcgcgtcagcgcacggctgcaatatggttgtacctgggtcaatacccatttcatgctggtaagtgaaatgccgcacggtgggcagaaactttctggttacggcaaggatatgtcactttatgggctggaggattacaccgtcgtccgccacgtcatggttaaacattaaggataatattgcagatcgtaagagtatgagatgatcttgcgtactgtcagagcactgatttctctgacagtacgtgctgcgtgcaaaatcactacatcaaataaaccagccaaatctcatagagataagagtaaacaaaccaacagcagcaaagaaatttatcagtactacagttctactggaaacattcatttttgccaccttttatcattgcccctatgtgtatagtacgggttaagaaaatccgcaataatactcattctgaagatggataagggcaagttgctgtttgatgattttttctcaaactggtgaaaaaacttgatgcacgtcaaaaaatgacgcatatttgcgcgcgttttattcatctggctggacgcccgtacatgtctctctatcaacacatgcttgttttttatgcggttatggcagcaatcgcatttcttatcacctggtttctttctcacgataagaaacgcatccgtttcttaagcgcctttctggtgggggcaacatggccgatgagtttcccggtggcgctgttgttttcactgttttaaatcttactcactggcttgacggcaccacgcagacttatatcatttggatgaatcgataaatttcacaagtggctaaggagaaagtatgtcgcatctggatgaagtcatcgcgcgcgtggatgccgcgattgaagagagcgtcattgcccatatgaacgaattattaatcgccctgagcgatgacgcggagttaagtcgggaagatcgctacacccagcagcaatgtctgcgcacagcgatcgcccatcacggtcgcaagcataaagaagatatggaagcgcgccacgaacagttaaccaaaggcggcaccatcctctgattaaaatgagcgtctggctaccaaccaggcgccaaccacaagtaaaattgcgccacaaattgggccgaacaacgcccgtagtggtacgccatgactgcggaagatatccagcatcagaccgccaatcagctgactggcgaccagtacagcaatagttgtcgccgctcccacattctgatatccgctgatactggcgaagacaaaaaacgatcccagcaagccaggtataagtgtccaccagcgcacgctggacaccagttcgccaaaccccgccatgccttgtttaaaccataaaatagaaacaaagagcacaatccccaccagtgagttcagcaacatggcgatgagaatggtagaggaggtctgggtgatgcgcaccatcagcgtgttctggacaaccagaccaattccggcggcaatcaaaaaagcaagggtgagcgactgattcatccaatcgcgtccggttcagtgcgctcgtcgagttgcaactgcataaatgtcagatccagccaacgaccaaatttagtgcctacctgcggcatttgcgcggtgacgacaaatcccagcgactggtggagatgcagcgaggcctgattttgcgattcgatcccggcgaccatgacatgcttcccgcaatcccgcgcttcatcaatcaatcggcttaacaatttacgccccagacctttgccctgatgatcgggatggacataaaccgaatgttccacggtatggcgaaaaccatcgaaactacgccagtcgccaaacgaggcatatcccgtcactacgccgttttcctcgctcaccagcactggataacctgctaaagtccgcgcttcaaaccaggcaatgcggttatcagcatccaccgtttggtcattccagatagccgccgtatacaacacggcgtggttataaatttccgcaatggcagcacagtcggctttgcgggcaaaacggatggacatgtctggcctcaataaaataatgatgatgatgttatcaatactatcgaaaacagcccgaagcaacggattcctcgatgaaattattgcgtgttgcagaggggatgtgacggctgcaaacaaaaccaatcccgtgagcctgctactattgatggattcatgccaaaagcacaggagagcattatggggcaacaaaagcagcgtaatcgacgttgggttctggcctcgcgtccacatggcgcacctgttccggagaatttccgtcttgaagaagatgatgtcgccacaccgggtgaaggacaggtgttactgcgcacagtttatttgtccctggacccgtatatgcgtggacgtatgagcgatgagccatcttattcaccgcctgttgatattggcggcgtgatggtcggcggtacggtgagccgtgtcgtggagtcgaatcatcctgattatcagtctggcgactgggtgctgggctacagtggatggcaagactatgacatatccagtggtgatgatctggtgaaacttggcgatcatccgcaaaatccatcgtggtcgctgggtgtgctagggatgccaggctttaccgcttatatgggcctactggatatcggtcagcctaaagagggcgaaacgttggtggtagctgcggcgacaggaccagtgggggcgacggtggggcaaatcggcaaacttaaaggttgcagagtggtgggggtagccggtggcgcggaaaaatgccgccatgctaccgaggtgttaggcttcgatgtttgtcttgatcaccacgcggatgattttgccgaacaactggcgaaagcgtgcccaaaaggtattgatatctattatgaaaacgtgggcggtaaggtattcgatgcggtgctaccgttacttaatacatctgcgcgcattcccgtctgcggattagtgagcagctataacgctacagagctaccacccggtccggatcgtttacctctgttgatggctacagtgctgaaaaaacgtattcgcttgcaaggttttattatcgctcaggattatggtcaccgcatccatgagtttcagagggagatggggcaatgggtgaaagaggataaaatccactaccgcgaagaaattactgacggtttagagaatgcgccacagacgtttatcggcctgctgaagggtaaaaacttcggcaaagtggtgatccgcgtggcgggtgatgattaaagtttcaacggcggcgtaagccgccataaaaatccaggcaaaaagcttattttcagctttaattaactaaccacatcattgttctgctgctaataacaacaaaggtgagtggtttatgattattcactttaatacaccaggtgaattccttctgccatgcaggcagggttggacagaaaacacgcgaaggaattaaaatgcctggaacgggaaaaatgaaacatgtcagtttgactctgcaggttgagaacgacctgaaacatcagcttagtattggcgcattaaaacctggcgcacgcctgattactaaaaatctggcggagcaattaggtatgagtattacacctgtgcgtgaagcattattacgtctggtttcggtgaatgcgctttctgtcgcacctgcacaagcatttacagttccggaagtggggaaacgtcaattagacgaaatcaatcggatccgctacgaactggaattaatggcagttgctctggctgttgaaaacctcaccccgcaagaccttgcggaactccaggaattgctcgagaaattacagcaggcgcaagaaaagggcgacatggaacaaatcattaatgtaaacaggctatttcgcttagcgatttatcatcgctcaaatatgcccatcctgtgtgagatgattgagcaactgtgggtcaggatggggcctggtttacattatctctatgaagcgattaatccagcggaattacgggagcatatagaaaactatcatctgttactcgctgcgttaaaagcaaaagacaaagagggatgcagacattgtcttgctgaaattatgcaacaaaatattgctattttataccagcaatacaatcgttaaagtaaatgcccggcaaataccgggcatcaaggtaattactcaaatctccacgcaatattcatgccgacaccataatttcgtccgggcgaaggttcgtaatatcgcccgtttgactcattgacaatgacagaaccaacgtattctttatcgaataaattatcgacacgaccaaataaatccacagttaaattgtggtaattgtatttatacccggtgaataagccgacgagagtataagacggcgcttttgccgtattttcatcatctgccataatatcgcccatataacgcgcttccgtgcctgcataccaaccatcttccggtacataacctatcgacgcaaagcccatattacgggcgatccctggcatccgattaccgttacaatcctgttcattgcaaacattgctgcgataggtcgcatcaagccaggtccaggacgcgtttacgcgaaaatctcctgcgaaacgttgatcccatgccagttcagcgccttgacgacgggtctttccggcatttttgtaagtcgtacgcccaccgctactgctatcgacaacaatttcatcatcagtgtcggtctgaaacaatgcgagactaagcagcccatcaccaatacgcgttttactgccgatctcaattgtatcgttggtggatggttttaaacctaagttcataccgctttgcccatcagcacgataagacagctcattaatcgtcggcgtttcaaaacctcgcccggctgccagatagatattccaggcatcggtcattgcatattttaacgaaccggcaggtagccatttatgataactggcatcaccgctgtcatcgccgttacccggagtaacgtaatggtcgttggaatcaaaccacacggagctgtagcgcacgccagcatccagcgacagtttttcgctcagctgccactgcgtctgtaaatagggatcgatgttccacatcagattgcgttcgtcgcgacgcaactcacctttttgcccgtactccggcatgccgctattcaggcggaagttattgtagcccttgcggttttcactcatgttttcgtagttcaggccggtagtgaacgtgaccggaacgcccagttcaccacggtgtgtccagcggctgtctattccctggtaatggcgttgcagggtaatcacgccgcccgcatgtgacgggttaagttgtggtgccatgggtattgactggtactgggtcgtttctcgctctccggcatacatcatcacactcatatcatcccgcgaactcaggctacgctcatagcgcaacccagcctgagtttgcttgatggtttttcgcgtgtcgtactgttctgcacgaggcgcttgttgtggattagccttccattctgctttggttagcccaccagggtcatctgctttgatatccacactattgaaaatcagacttaatttgctggcttcatcaatgcgtacgcccagtttggcattggctaaatttttctgtgcgccactatggtcacgatagccgtgggtcgtaaaacgcgtggttgagacggtgtaatcgacatcgccaggctgtgtgccgtctcccgttgcgcccgttgctttcagcccatagcgccagctgccaaaactgccgtagtaactactggcttcaatggttggtggctgttgtccggtctgggtggtgacattcattaccccaccagacgcgttgccatacagggcagagaaggggccacgcagcacttccacattttgcacactgcttaaatcgatgttggatgtttgcccttgcccgtcgggcatggtggcgggaataccgtccacatacaggcgaataccgcgaataccgtaagtggagcgggagccaaatccgcgaatcgacagctgtaaatcttgcgcatagttctgccggttttgtacctgcaaaccaggcacgccggtcagtgattcggacaagttaatgcgcggtgttgccaggcgcatctcctcgccatccaccacgcttactgctgctggggtatccagttctgaaaccacctgcggtgcggcactgacaatcatagtctgttcatcagcggcaaaaacaacgggggaaaggacaagcagtgcgggcaaaacggtctgtcggacggaaaaaatcttcatgaaaaaagccaggttaagaatgggaaaacgccgtcatggtaatgaaattgtaaatttatggaaaatgaaacggcacaatacgttaagtaattgagaaaattgtagtcgtaacggcaagaaatgctccacatttgagaaaataatgattaccattcccatttataacaagagcgtaacgatgattacgcttagcgaagcattgtgaagcagcaaaaatatcggttcatcaaagggagtcgtcatgcatttacgtcatctgttttcatcgcgcctgcgtggttcattactgttaggttcattgcttgttgtttcatcattcagtacgcaggccgcagaagaaatgctgcgtaaagcggtaggtaaaggtgcctacgaaatggcttatagccagcaagaaaacgcgctgtggctcgccacttcgcaaagccgcaaactggataaaggtggcgtggtttatcgtcttgatccggtcactctggaagtgacgcaggcgatccataacgatctcaagccgtttggtgccaccatcaataacacgactcagacgttgtggtttggtaacaccgtaaacagcgcggtcacggcgatagatgccaaaacgggcgaagtgaaaggccgtctggtgctggatgatcgtaagcgcacggaagaggtgcgcccgctgcaaccgcgtgagctggtagctgacgatgccacgaacaccgtttacatcagtggtattggtaaagagagcgtgatttgggtcgttgatggcgggaatatcaaactgaaaaccgccatccagaacaccggtaaaatgagtaccggtctggcgctggatagcgaaggcaaacgtctttacaccactaacgctgacggcgaattgattaccatcgacaccgccgacaataaaatcctcagccgtaaaaagctgctggatgacggcaaagagcacttctttatcaacattagccttgataccgccaggcagcgtgcatttatcaccgattctaaagccgcagaagtgttagtggtcgatacccgtaatggcaatattctggcgaaggttgcggcaccggaatcactggctgtgctgtttaaccccgcgcgtaatgaagcctacgtaacgcatcgtcaggcaggtaaagtcagtgtgattgacgcgaaaagctataaagtggtgaaaacgttcgatacgccgactcatccaaacagcctggcgctgtctgccgatggcaaaacgctgtatgtcagtgtgaaacaaaaatccactaaacagcaggaagctacccagccagacgatgtgattcgtattgcgctgtaatagatatggcgagggtgaaaacggtgagacttgcctgccttttatcacggcgtatccggcactttcgtcagtaatctgaatttgcccggcacgtagccgggcaattttgcaattaactcgccgtttcaggcttaaacacaatttcctgtttttcttcatcttcctcgacgactggcgcagtgctgtgaatttcagcaacgcgtttgcgcacaccaaaccagcctataaccagcaaaataccgataatcggcagcgccgcgatagtataagtcccgttcgggtaatcgaacgccatcagcacaaggacactcagtaaaaacagtaatgtcagccaggaagtgaagggcgcgccaggcagtttaaaactgacatccgctgctttgccttctttaatcgctttacgcaggcgcatctggcacacgatgataaacgcccatgaagcgatgattcccagcgacgcgaagttcaacacaatctcaaatacgcgcgacggcaccagatagttgaggaatacgccgacgacatacacaactagtgtcgccagaatcccggcatacggcacatgctgacgactcattttcgccataaaactcggtgcggaaccgcccatcgccattgagcgcagaatacgtccggtgcagtacagacctgaattcaggctggagagggcagcggtcagcaccacaatgttcataatgctgccgatatatggcacacccagtttagagaaaaacgtcacgaacggactttgccccgcctgatacgcgctccacggcaataacataaccagcaacaccacggagccgacgtaaaacaggccaatacgccaaatcacactgttaatggctttaggcaccatggtctgcggatctttacattctccggcagctgtacccaccatttcaatggaggcaaaagcaaacactacgccctgaatcaacaccagcgcaggcagcaaaccgtgggggaagaagccgccattatcggtgattaaatgaaagccagtggtgttgccatccagcggctgaccactaccgaggaacactgtacccacgaccaaaaaggtcacaatggcgagcactttaataagcgcaaaccagaactccatctccgcaaaccatttcacaccgatcatattcatggtgccaacgatggtaagtgcagcgagcgcaaagacccactgcggcacgccgccaaacgcaccccagtaatgcatatacagagcgacggcggtaatatcaacaatccccgtcatcgcccagttgatgaagtacatccagccagcaacataagcggctttctcacccaaaaactcacgggcataagaaacaaaactgccactggaagggcggtgtagcaccagctcacccaatgcacgcagaataaaaaacgaaaacaagccacaaattaaataaaccagtgccagtgcgggccccgccatttgcagtcgggctcctgcacctaaaaacaagccggtgccaatcgcgccgccaatggcgatcatctgcacctggcgattgcccatcgctttgtgatacccctcttcgtgggcattaagccagcggcgtttcgcggcgtgttgatctgaagtgtcggtgtcgtgtttactcattgctctccctgattgctttaatgaaaaagtcatataagttgccatgaacaatgtttattcatcctggcgatgatagttatcaccattattctttatgggtataaaactatcggcgcagcatcctacccgttatcgataaacgatgcaaaacatccccttacaatcctgaaggggattaatacaactgacgaaaaaatgacaaatccttttgctggttaacctgtgtactgtcctacacttaatctttaaaagattgtgaggggcatatgattaaggtgtatggcgtacccggatggggctctacaatcagtgagctgatgctaacactggctgatattccttatcagttcgttgatgtcagtggttttgaccacgagggagcttcacgcgagttattgaaaaccctgaacccgttgtgtcaggttccgacactggcattggaaaatgacgagattatgacggagacagcggcgattgcattgatggttctcgatcgtcgcccggaccttgcgccaccggttgggcgcgccgaacgtcagctgtttcaacggctattggtctggctggttgctaatgtctatccaacattcactttcgccgattaccctgagcgttgggctcctgacgcacctgaacagttaaagaagaatgttattgaatatcgaaaatcgctttatatctggttgaattcgcagctcactgctgaaccttatgcgtttggtgagcaactaacgctggtggactgttatctttgcactatgcgcacatggggcctgggcatgaatggtttcaggataatgccacgaatatcagtgcgattgctgatgctgtatgtcagttaccgaaattacaagaagtattaaaaaggaatgaaattatttgagtgggataccagaagattatgttatttattattcagtgactttatccacaatgatgggcgtaattaattaaattcatggtatgttttttaatttatatcactctcattttcattcagcgtgtctattttatttcctctgaaaagaaactaactattcacattgtgcagatgtttcagttgttatcacaggcattctataatctcaaaatgtttttaatgatggatatgctcggagttggagatgcaattaatattaatacaaataaaaatatccggcaggtatgctaaaaggataaatggcgttctctgtatttattcgcaattatctgtaggacaaatatggagagcttgatgagtcagagctaaaacagcaattgattaataaacatgttgatttattcaagaaaatggatgtattttaaatgttgattcttaatataacctaatcaatagattatcaagtgagagctacacattattggaggggcaggggaaaacaccattttgggaacaatgcatcaggtactcttaccactgaagcaagatcatccggcaccaggtggtggtgcagtgctttggaaatggtcccctcgggggagttgtcattattttctatgctatttgcttattatattcatcaggtgaatttaataaattcctaatttgaaatatccactattaagctagtgtttaacgacgttaagatggcaatgtgcagatcatgttatcagggtggggcggtagcgtatattccttatacaaaccatcattcatttcaatgattgttattgaattatttattgttgtgaataaaaagacattatgaatattggtttgactttgcatatcaggttttttattactcgctgtaatgtacgagcctgtcgtgaataacgtcgagaacccatccgttgcgtttgtgattattttgttgactaaacagacacccgtttctctgaagtaaaatcccagactaaatcatcacataaccatgacatttttctgatattccccggtaacgccagatgtcgactcgcttaaccaccctcagccataccagtgaaggccaccgcgtgtcggtccactacggctatgacgataaaggccgcctgaccggcgaacgccagacggtggagaacccggagacgggggaactgctgtggcaccatgagaccggacatgcgtacaacgaacaggggctggcaaaccgcgtcacgccggacagtctgccgccggtggagtggctgacctacggcagcggctatcttgcgggcatgaagctgggcgggacgccgctgctggagttcacgcgcgaccgcctgcaccgtgagacggtgcgcagcttcggcagcatggcaggcagtaatgccgcatataaactgaccagcacatacacccccgcaggccagttacagagccagcacctgaacagcctggtgtatgaccgtgactacgggtggaatgacaacggcgacctggtgcgcatcagcggcccgcgacagacgcgggaatacggctacagcgccacgggcaggctggagagtgtgcgcaccctcgcaccagacctggacatccgcatcccgtatgccacggacccggcgggcaaccggctgccggacccggagctgcacccggacagtacactcacagtgtggccggataaccgcatcgcggaggatgcgcactatgtctaccgccacgatgaatacggcaggctgacggagaagacggaccgcatcccggcgggtgtgatacggacggacgacgagcggacccaccactaccactacgacagccagcaccgcctggtgttctacacgcggatacagcatggcgagccactggtcgagagccgctacctctacgacccgctgggacggcgaatggcaaaacgggtctggcggcgggagcgtgacctgacggggtggatgtcgctgtcgcgtaaaccggaggtgacgtggtatggctgggacggagacaggctgacgacggtgcagactgacaccacacgtatccagacggtatacgagccgggaagcttcacgccgctcatccgggtcgagacagagaacggcgagcgggaaaaagcgcagcggcgcagcctggcagagacgctccagcaggaagggagtgagaacggccacggcgtggtgttcccggctgaactggtgcggctgctggacaggctggaggaagaaatccgggcagaccgcgtgagcagtgaaagccgggcgtggcttgcgcagtgcgggctgacggtggagcaactggccagacaggtggagccggaatacacaccggcgcgaaaagttcatttttaccactgcgaccaccggggcctgccgctggcgctcatcagcgaagacggcaatacggcgtggcgcggggagtatgatgaatggggcaaccagcttaatgaggagaacccgcatcacctgcaccagccgtaccgtctgccagggcagcagcatgatgaggagtcggggctgtactataaccgtcaccggcactacgatccgttgcaggggcggtatatcaccccggacccgattgggttgagaggtggatggaatatgtatcagtatccgttgaatcccatacaagtgatagacccaatggggttagatgcgattgagaatatgacatcaggtggactaatttatgccgtatctggtgtacctggattgattgctgcaaacagcattactaacagtgcttaccagttcggttatgatatggatgctattgttggcggagctcataatggggccgccgatgcaatgagacattgttacttgatgtgtcgaatgactaagacatttggatcaacaatagctgacgtgataggtaaaaatcatgaggcggcaggggatagacaaggtcagccagctaaagaaagaatcatggatcttaaaaataacactgtcggtattgcttgtggcgatttttctgccaaatgtagcgatgcatgtattgaaaaatataacactgggcaactcttcgggttagatggtataaaagcagataatccaataaaagcaaagcaagggagttcagatgcttcaaattattagaggcaaacttgtcatttttttaattaccctttgtttatttgttgtttaccttgggtttgataacaattcaaattctgacatcgtattttatggacataaaacaccaaagagcgttgagatatatctttctgaaaaaaaatattatttataaaataattaatgaccaaaaaattagtagagggaatggtcattttataagtataatggttaataattacaggacgcactgtggagtggttgatataaatcttaattttttcaatgatattctttatagcgtgcgattaaaaaacattagtaaactggagaatatggagttctgcgctacaaaacaacgggtgtattttagtgataaaaacaagaaggctagttataaaataattaattatggagactattatgatgttgattattatgataacaatttgaaaaatgaagtttttgactggattggtaaatggtcataatgaacaacaccagaaagagaaaaatataaaatacatacagaaagacatgagagcaagggacggggcagggcaagatcatgaaaattgtgatgtaaatcacgattttcatctttgctttaacgcctacaggtgatcaaaatttaacctttggaataactaaaaagataaaaaaggacgccaggtgagtattcaaagtttgcttgattatatttcagtgacccctgatatacgacaacaaggaaaggttaaacataaattatctgctattttgtttctcaccgtatgtgcagtaattgcaggtgccgatgagtggcaggaaattgaagattttggacatgaaagacttgaatggctaaagaaatatggtgattttgataatggcattccggtcgatgacaccattgcacgcgttgtgagtaacattgacagtttggcctttgaaaagatgtttattgaatggatgcaggagtgccatgaaatcactgatggtgaaattatagcaatagatggaaagaccataagaggctcctttgataagggaaaaagaaaaggagcaatccatatggtgagtgcattctcgaacgaaaatggtgttgtactggggcaggtgaaaacggaagccaaaagtaatgagattacagccattccagagttgcttaacctactgtatttaaagaaaaatttgataaccattgatgctatgggctgtcagaaagatatcgcttcgaagatcaaagataaaaaagcagattatcttctggcagtaaaaggcaatcaggggaaattacatcatgcattcgaggaaaaatttcctgtaaatgtgttttctaattataaaggcgattcgtttagtacgcaggagataagtcatggaagaaaagaaacacgtttgcatattgtcagtaacgtaacgcctgaacttttgtgattttgaattcgaatggaagggattaaaaaagctttgtgtagcattgtcattcaggcagaagaaagaagataaatcagcagaaggtgtaagcatccgatattatatttcatcaaaggatatggatgctaaagaatttgcacatgctatcagagcgcactggctgatcgagcacagtcttcattgggtgttagatgtaaaaatgaatgaagatgccagccggataagaagaggaaacgcagcctaaataatatctggaataaagaagatggcactgaatttattaagagattgcaaagacattaagggtgaagaggaaaagaaagaaggctgcgttaaacacagggaaagatcatcagaagttcactttttgtactaaacaattcgcattttatgtttaaaaattgagatattccttattacctaaagctgttttttattgcttacacatgatcaaatactccttacataattaaggagaacaaaatggaacttaaaaaattgatgggacatatttctattatccccgattacagacaagcctggaaaatggaacataagttatcggatattctactgttgactatttgtgccgttatttctggtgcagaaggctgggaagatatagaggattttggggaaacacatcccgattttttgaagcaatatggtgattttgaaaatggtattcctgttcacgacaccattgccagagttgtatcctgtatcagtcctgcaaaatttcacgagtgctttattaactggatgcgtgactgccattcttcagatgataaagacgtcattgcaattgatggaaaaacgctccggcattcttatgataagagtcgccgcaggggagcgattcatgtcattagtgcgttctcaacaatgcacagtctggtcatcggacagatcaggacggatgagaaatctaatgagattacagctatcccagaacttcttaacatgctggatattaaaggaaaaatcatcacaactgatgcgatgggttgccagaaagatattgcagagaagatacaaaaacagggaggtgattatttattcgcggtaaaaggaaaccaggggcggctaaataaagcctttgaggaaaaatttccgctgaaagaattaaataatccagcgcatgacagttacgcaatgagtgaaaagagtcacggcagagaagaaatccgtcttcatattgtttgcgatgtccctgatgaacttattgatttcacgtttgaatggaaagggctgaagaaattatgcgtggcagtctcctttcggtccataatagcagaacaaaagaaagagctcgaaatgacggtcagatattatatcagttctgctgatttaaccgcagagaagttcgccacagcaatccgaaaccactggcatgtggagaataagctgcactggcgtctggacgtggtaatgaatgaagacgactgcaaaataagaagaggaaatgcagcagaattattttcagggatacggcacattgctattaatattttgacgaatgataaggtattcaaggcagggttaagacgtaagatgcgaaaagcagccatggacagaaactacctggcgtcagtccttacggggagcgggctttcgtaatcttgccctgggcattattgtcgtataaacgctttaccggacacatgacattcacaatgtgtgttaattttactgacatctttcaaaaggagcgtaatcatgccgcacatcgacattaaatgttttccgcgtgaactggacgaacaacaaaaagcagcacttgctgcagatattaccgacgttattattcgtcatctgaacagtaaagacagttcgataagcattgctctacagcagattcaaccagaatcttggcaagctatctgggatgccgaaatcgcgccccaaatggaggctttgataaagaaacctggttatagcatgaatgcttaacccgccgtaacacgcttgccgctggtaacaaacgtcccagcacctaaatgatgcaacgtattgagcttatcatcatcaaactgccagcggccttcgacaaatacccgtgcgtctgccgctgctgatactacttcgccaaacagcgtgtcgtattcttcttgcgcagaagtcgcaggtagcaatcgacactccatccacgccagacatttttcctcgaccagaggcaaaccaaataccgggcctctcacaaccggaatgccatagcaattaaatttatcttcatcacgccccgacacacttcccaccgcccacgtccagttagttgctgcaacgcccgggataacgatgccaaatttaccgttatgttcaatcaactccctggtccatgtcgatttatctaccacaatcgccacgcgtggaggttcaaactccaccggcattgaccaggctgcagccataatgttacgccgctgggattgctcatcgaaactggtgatcaagaccgttgggccatgatttaacagacggctggcatggtgtaattctatggggatgaatcggctcatggtatcgcctcgcgaagaaggtttttttaagcgtagtccgtaacgcaataagtaacgaaattaacgggattggcgatttgcgaacgtgatgcatgtccgcgatcgcacaaaatagccggtgcggcgtctattccaggttataagttgagaaaaccactaagggaaacgcctgatgacacccattctgaatcactattttgcccgtattaactggtcgggagctgctgcggtcaatattgatacgcttcgtgcattgcacctgaaacacaattgcaccattccgtttgaaaacctcgacgttttgctgccgagggaaatacagcttgataatcaatcgccggaagagaaactggtgatagcccgtcgtggcggttactgttttgagcagaatggcgtgtttgagcgggtgttacgcgagctggggtttaacgttcgcagcttgttagggcgcgtagtgttatcaaatccgccagcattaccgccgcgcacccatcgtttgctgttggtggaactggaagaggaaaaatggattgctgatgtcggtttcggtgggcagacgctaaccgcgccgattcgtttagtttccgatctcgtgcagaccacgccacacggagagtatcggttgttgcaggagggtgatgattgggtgttgcagtttaatcatcatcagcattggcagtcgatgtaccgttttgatctctgcgagcagcaacaaagcgattatgtgatgggcaatttctggtcggcgcactggccgcagtcgcattttcgccatcatttgctgatgtgccgccatttgccggacggcggcaagctgacactgaccaattttcattttacccattatgaaaatgggcacgcggtggagcagcgaaatctaccggatgtggcgtcattatatgctgtgatgcaagaacagtttggtctgggcgtggatgatgcgaaacatggctttaccgtggatgagttagcgctggtgatggcggcgtttgatacgcacccggaggcgggaaaataatttatgtcaggttgccggatgcggcgtaaacgccttatccggcatacattagcccggttgtagacctgacaggcgaagcgcatcagacaacggtttcagagttcaattgcccattcggcatgaaacaaaatcaccgctgtgactgaaatggtgactttttccggttggttatcacgaattgtcaccgtcacttcaatcataccgtcacgccccaatgcgcgcccctgatggcctttaacacgcaacacgttgccatcgtggggcaatacgttgtgatgtaccaaccatgcacccatcgggccattggcattgccagtcaccggatcttccacaataccaatcgcaggcgagaacatgcgaccatcggtttcgtttttgcctgggcggatctggaacgggaagaaaccattgcagccaatctttttgctgatagcggtcagcgcattaaggtcaggcgaaagggcgtcgatatccacttccggtttcagtgggatcatcacttttgagtgtcctgttgttgccacctgaattggcaagcctggcagaatatcgtcctcagtgagatgaagcgcgttgataatcgccgcacgtgtttcaccttccagcggtggctcaaagcccggcgtaccttgttccagcgaaatacgataatcatcgttgtgcttttcgatagtcacgcgatgttttcctgccagcgatgtttgccagatcgtgcaatttcctaaacctaacaccttcgcacgtacatagtgcgcagctactgtcgcgtgaccgcaaatcggcacttcaaccgttggcgtaaagtagcggatgcgcacatcgctgtcgtcgctgtgcagcagaaaagcagtttccgaatggcctaactcgcgggcgataagctgcatttgcgcttcgctaagattatcggcggggaaaacaacaccggcagaattgccgcgaaacggttgtgaggtaaaagcatcgacgtggtacacctgcggtttcattaacgttctcctgtgactggagaactatcatagcctgcaagtggccggagagcgaagggctatccggccagggtgaaattatcgccgcgaacgcacaatttgatatcgacgagtaaagtactcaaacggcgcgctccacacatgcaccagtcgggtgaacgggaagtgcaggaagatggtcattcccaacaccagatgcaggcggaagacgaacgctacgccgttgagcatctctgacgatccaccacggaaagtgacaatgctttgcgcccaacccaccagcttcatcatttcgctaccatcaggatactgtgctgaaaacggtatggtacttagccccaacagacactggatcagcaaaatgctcatgatgatgatatccggcgtagtggaagtggcacgcacgcgctgatttgtcagcctgcgccacagcagtcctgcgccgccaatcaacgtcaacacaccgcaaataccgccgagcaccatcgccatgagttgtttcgctgccactggcaaaaaccacgcgtacatccagtgcggcgttaacatgccgaacaagtgcccgaagaaaatccccaaaatgccgatatggaacagattcgaccatatcaccatcccgcgtttatcgagcatttgacttgaggaggcgcgccaggtgtactgcccgtagtcgtagcgcagccagctgccgaggaaaaacaccgtcgcacaaatgtacgggtagatatcgtaaaaaaagacgttcagatactgaatcatttcccacctcccgcactgatgtcgacatattgcggcgcgacatcctggctaaagcgtcgctgatattgattaagcggcgagctgtcacacgccgtggcgttatcttcaataaacttcacctgttcctcttcccacactgcatcaagcgcctggcgggtgtcatcgcgctcttcgctgtttacttgttttgtgacactgtcacttgaaagggagcttcccgccagttgcagcagagcatcaaacaacgcgtaccacggtgcctcgcgttgttttaagcgaccgccaagcagggcgaggatcggcgcaacattgagcaatccttctttcgcctgatcgtcaggcagtacgcttaaatactccagatacagcggtagataatcgggcagttcccgacaatccagctgcaggccgaccttttcatactccgccagcaggtccaccattgcctggccgcgatcgcgggactcggcatgaacatgttcgaacagcagcagcgacgtggtgcgcccgcggtcaaacacttcgcaccattcggcctgtttatccagcagcggcgcgttaagcaggttgtgggtgaaatccgtaagcatcggcgcgtcgcggcggatcaacgccagcgcgtcctccttgcattcccacaacagctcgtccggatactccatcaacaggccgatcactttgaggatctgcattattcgccctccgctttgtcgcgcacttcggtgatgttgatggcatcgatacggctactgttgaacaggttgaatttactgtccgaaccgtggcaaccgtcgccaaaggtaaaaccgcagccgttgcgttctgcgaaggcatcgcccgccatttcccgatggctggtcgggataacaaaacgatcttcatagttggcaatggcgagatagcgatacatctcttcgacctgggcgacgctcaggcctacttcgtcgatggcacgagtatcagtaacgccttccacggtttgtgaacgcatatagtggcgcatcgccatcatccgtttcagcgcccgcagtaccggaccggtatcgccggcactcaacatattggcgagatattgcaccggaatacgcaggctttcgatggcgggcagcacgccttcgcttttcggcaaaccgcccgcatctgcgtaggactgaatcggtgacagcggaggaacgtaccagaccatcggcagggtgcggtattcagggtgcaacggtagtgccagtttccagtccatcgccattttgtagactggcgaacgctgggcagcgtcaatcacattttgtggaataccttgtttcagggcttcctcgatcactgagggatcgtgtggatcgaggaacacttcgcactggcgttcatagaggtcaacttcgcgctcggtgctcgccgcttcctcgatgcggtcggcgtcgtaaagcagcacgcccagataccggatgcgacccacgcaggtttctgagcacacggtcggttgaccggactcaattcgtgggtaacagaagatgcatttttctgacttgccgcttttccagttgaagtagatttttttgtacggacaaccgcttatgcacaaacgccagccacggcatttatcctgatcaatcagcacaatgccgtcttcttcgcgtttgtagatagcgccgcttgggcaggtcgccacgcagctgggattgaggcagtgttcgcacaggcgcggcaggtacatcatgaaggtgttttcaaactgcccgtacatctccttttgcatggcctcgaagttgcggtcgcgggcacgtttttcgaactcaccgcccagcagttcttcccagtttggcccccagatcactttgtccatccgtttgccgtcaatcagtgaacgcgggcgagcagtaggaatatgtttgccttccggtgcgctatgcaaatgttcgtagtcgaaggtgaaaggttcgtagtaatcatcaatctgcggcaccaccgggttggcgaagattttggttattacgcccatcttgttgcccagacgcgggcgtatcttgccattcacatcacgcacccagccgccttgccactcttcctgatcttcccagtttttcggataaccaatgcccggtttggtttcgacgttgttaaaccatgcgtactccatgccttcgcgcccggtccagacgtttttacaggtcaccgaacaggtatggcagccgatacatttgtcgaggttaagcaccatgccgacttgtgaacggattttcattttttcgcctcctgtacctgatcgcgaccttcatcatccagccagttaacgttcttcatcttgcggatcatgatgaactcatcgcggttcgatccgacggtgccgtagtagttaaagccccaggccagctgcgcgtaaccgccaatcatatgcgttggtttcgggcaaacgcgggtaaccgagttatgaatgccgccgcgcatgccagttacttccgaaccaggaatattcataatgcgttcctgggcgtgatacatcatggtcatgcccggcggtacacgttggctgaccaccgcgcgggcagtcagcgcgccgttggcgttgaatacttccacccagtcgttatcgacaatggtcagttctcgggcatctgtttcgctgatccagacaatcggtccaccgcgagagagcgtcagcattagcaggttttcactgtaggttgagtgaatgccccatttctggtgcggcgtcaggaagttaagtgctttttccgggaagccgtttggcggtatctggcgcatctcactgacgctacgggtgtcgataggcgggcgataagccaccaggctttcaccaaaagcacgcatccacggatgatcctgatagagctgctggcgtcccgacagcgtgcgccacggaattaactcatgaacgttggtgtatcccgcgttataggagacgtgatcgctttccagaccggaccaggtggggctggagataattttacgcggctgcgcctgaatatcgcgaaagcgaatcttctcgtcctctttgtgcagcgccagatgggtatgttcgcgcccggtgatctcgcccagcgcctgccacgctttgactgcaacatgaccgttggtttccggtgccagtgccagaatcacttctgaagcgtcaatggcggtgtcaatcagcggacgcccctgtgccgggccatcacgcttggtgtaattgagtttgccgaggaaatcgatttcatcctgggtattccacgaaatccctttaccgccattgccaagtttgtccatcaatggcccgagcgaggtaaagcgttcatacgtagcagggtagtcgcgctccaccgccacaatattcggcgcggttttgcctggaatcagatcgcattcgcctttgcgccagtcgagcacttcacacggctgtgagagctctgccggagagtcatgcagtaggggttgtaataccacgtcggtttctttgccaagatgacccacgcacacttgcgaaaatgctttggcgatacctttgtagatttcccagtcgctgcgtgattcccacgccggatcgaccgccgcagaaagcggatgaataaacggatgcatatccgaggtgttcatatcgtctttttcgtaccaggtggcggtgggcagaacgatatcggagaacaggcaggtactggacatgcggaagtcgagcgtcaccagcaggtcgagcttgccttcaatcgctgcagtttgccactcgacttcttccggtttgatcccgtcgctggcaccgagttcctcgccctgaatcccgctttcggtccccagcagatacttctgcatatactcgtggcctttgccggaggagccaagcaggttagagcgccagacaaacaaattacgcggatgattgctgctgctatctggttgttcgcaggccatacgtaaatcgcccgatttcagcgcctgggcggtaaattctgtgggggataatccggccttgtcggcttcagctttaatcccgagcgggttacgccccagctgcggcgcagaaggtagccagcccatacgttcggcgcgaacgttgaaatcaatcagatgaccgctgtacttactggcatcggcgagcggtgaaagtaactcctgagcagagactttttcatagcgccattggctggaatgattgtagaaaaacgaggtgctgttcatttggcgcggtggtcggttccagtcgagcgcaaaggccagtggcaaccagccggtttgtgggcgcagtttttcctggccgacatagtgtgcccagccgccaccgctttgcccgacacaaccgcagaagatcagcatattgatcatcccgcggtagttcatgtccatgtgataccagtggttaacacctgcgccgaggataatcatcgagcgcccatgcgttttatgggcggtatcggcaaattcacgggcgatggtttcaatatactggcgcggcacgccggtaatttgctcaccccaggctggggtgtacggtttgatttcagcgtaatctttcgcactgttttcatcttccagcccgcgatcgaggccgtaattcgccagtaccaaatcataaacgctgaccaccggacaggtgttgccatcgactaacgtcaggtttttaacgggcaattggcgcaccagcaccggattgtgttttacgctgcgaaaatgcggattttcaatgccgccaaagtaggggaaggccacgcctgcaacagcgtcatgttgaccgagcagggttaacgacaattcggtttccgtaccggcggcaatggattccagattccatttgcctttttctccccagcggaaaccaatcgaaccgttcggcactaccaattcacctgcggtattaactgctacggttttccactgcggattgttgctttcgcccagtccatccaccaggtcagatgcgcggatcatgcgcccgggaacgtagctaccatcgtcgcgaggctccagcattaccagcatcggcatgtcgctgtagcggcggcagtagttgataaagtagtcgctgggattatcgagatgaaactcttttaaaatcacatggcccattgccatcgccagggcgctatcagtgccttgtttcggtgccagccactggtcgcacaatttggccacttcagagtagtcaggggtaatggcgatggttttagtgcctttgtagcgtacttcggtaaagaagtgggcgtccggcgtacgtgtctgcggtacgttagacccccaggcgatgatgtagctggagttataccagtcggcagattccggtacgtcggtttgctcgccccaggtcatcggcgaggcgggcggcaggtcgcaataccagtcgtagaaacttaaacaggtgccgccaagcagcgacagataacgcgttccggcggcgtaagaaaccatcgacatcgccgggatcggcgagaaaccggcaacgcgatccgggccgtaggttttgatggtccagacgttagcggcggcaatcagctggtttagttcctgccagttggagcggataaacccgccgcgcccacgcacttgtttgtagctcaggcacttttgcggatcgttcataatcgatgcccacgccagtaccggatcgctgtgttgcttgagggcttcgcgccacagttcaatcagtcgtttacgaatgagcgggtatttcaggcggttagcgctgtaaagataccaggagtaacttgcgccacgcgggcagccgcgaggttcatgattgggcaggtcagggcgagtgcgcgggtagtcggtctgttggatttcccaggtcaccagaccatttttaacgtagattttccagctacaggagcctgtacagttaacaccgtgggtggaacgcacgattttgtcgaactgccaacgctggcgatagctgtcctcccagtcgcggttgctatgcatcacctgtccgtgaccatcggcaaaggtttcgcccttttgtttgaagtagcgaaagcgatccaaaagtttactcatgacatgactcctgctccaggaatgaattgggatctgatgccttgtcggatgcgacacggttgtacatcaggcatcgatctcttatttttggctgaacttccgccgaccataaaccagccaggtcagcagcacacaaacgatgtagaagattaaaaacactttcatcgcgccgaccggagagccggtcatattgagcgacatgccaaacgcctgcggaataaaaaagccgcccactgcgccaatggctgagataaagcccagagccgccgccgtttcggtgacggcttctttatgagcttgctcatcactaccgcctttcatctttacccgataaatggttatctggcgaaagatgacggcgatcatctggaaagtagaaccacttcccagacccgcagtcagaaacagccccataaatacggcgtaaaaggcgatgaaattaccggagcctgtgcccggtaaggtaaggaacagcagggcactgaaaatcgccataaaaataaagttgatcaacgtcacccgcacgccgccgaacttatcggaaatagcaccaccaaccgaccgcgcgatggcaccgataaatgggccaaagaacgccaggcgcagaatattcacatccgggaactgggtttttgccagcatggcaaaacccgcagaaaaaccgataaacgaaccgaaggtggcaaggtaaagcaggctcagcagccagagatgcaggcgttgtaagacagggagctggtcggcaattgaggcgcgtgaactggcgatatcattcatccctgaccatgcggcgatcgtggcaatcgccagtagcggtacccaaatccatgcggcattcgccagcgacatcaccgaaccgtcggcctgcggtacgccattgacgccgagaaaggcaaatacaggtacaaaaatgaccagcggtgcaaccagctgcattacacttacacctaagtttcctaatccgccattaatcccaagagcgctcccttgtttggcttttggaaagaagaaactgatattgcccatgctcgaagcaaagtttgcacctgcaaaaccgcatagcaaagcgataacgataaatatcccaaaaggagtattcggattttgcacggcaattccgagccagacgcaaggaataatcaggattgcagtactaaaaaccgtccatcggcgtccaccgaatataggcaccataaaggagtagggaacacgcaataatgcgccagaaacggagggtaatgcggttaataaaaagagttgatcggtagtaaaattaaaaccgattttattgagattaacggtaactgcgctaaatagcatccagacacagaaggcaagaagtagacaactgactgatatccagagatttcttcaagcaatatgttttcctttattttcccagaaggccggattttctggtttccagtcgcgcaaaagataacgactatttttctcattttgcagtgccatattgttcctcacatgcacacattggtaatgaaaaaaagacaaaacacgaggtaaggcgcaatagccagttattagaattaaggatgaattgggtgaagtgctgattgaaagaatagataagaaagcgtaaccgcgggggcagaatggggattaagtagccagatatgtgttactaaatgtaactaacaagctaaccttcaaacggggttaatctttgaacgtatgtcatgtttcaacccttcagatcgtgaatctaaagggttacatattaactatattatcaacaagaccagacacttatagaattagtgatgatttattcactaaaaaggccatgaactggaggaaaacgatctgtccagaaggtctatcggttcctctcttattgcctgattgtaataatcgttattacagtaagtattgtttatttcatctaaggtcatgtttttaacttttatattcctctggtttacaacttcctctgtcttgtaagtgtgtatattatatggggtatatgcttttttaataggatagtgaaacaattcgttatccacatctattccgtcagagtgaacttcaaatgcaccaggcgaaagaattgccaggccagtattaagcttaagtgctggggaaaacaaattaaataacatgagctgcatagtagggcaattgttcttcccagaaacatttaaaaaatttaagttttgctctgttttattatggggaataaagttccaatatcggatgtattattagtatcaatgtgggttattttattattgtccagtcttaaacttttgatagatggaagataagtcaggaaatcaagatttatatatttcaactggttgttagcagcgtttaatgtctgaacattgcagaagttgctatagaatattttaatttcagaaagcaaattgttgttaataagtaacgtattcaagttgggaaataagtcattgtgtaaacttgttagtttattatgggatagatccagcagtaagagttcatttttattacctgcaacaatatcagttaattgattatggctgagattcaggtattgcagccattcgcaagattctaattgcacaaactctagttgattatgtgccgcactaaaataagtaactgatgaaagcctatctatatcaatatttctgagagcattattattcatagatatatgtgtaatacttacatttctgccttgaggaaaatttattgactcaagagcattactattcagacttagctttacgagtctatcgtagttggttgcatcaaaatgtgtgagttggttattatcaagattgatagatgtgaagttttgcagccctggtggttgagtggttaaattaagtcctgataaatcaatggtcacttcattagtgtcatcaattatatttcttactgcagtccagtactgcatttgtgcaagtggatcattgttgatgccgttaactaatacatgccaaagatgttttgatgatattagttgatcaatgtcattggttggcagtaaattgttattgcttaagtttaaatattccagttttgtagtgtttttggcgtttaaatgtgcaatatggttgtcgtttaaagtgattgttttcatcctgggatgattgtgtaatataaggtcagtgatcatattgtgatgggcacttaactcaatcagagattcttgccgcgcgagccgttggcttcatcgttatagcctttaaaatcatattcccagtgaccaaaaccaatcatttgatcattgatttgcgtttctcctttaaagccgagacgggcataagttttatcaccatcgtcacgcttatcatcagtaaaataacgtagagcggtaaccttgccataaaggtcgagtttattaccatccttgttatagacttcggcagcgtgtgctacgttcgcagctaacaaaccagttacaaccaccgcaactatttttaatttcatttaacagaatccttttaattatcgttaaacgtattttctaaacgaattttaaacggcgtcatttataaatgacatactgtttttaaaatagaatggtgattaaaaacaatgagaaaaatagatgaaataatattatttatcgatatgtgatcgaagtcgaaatgagatataaggtgaattactggtatttgaaatttatttttttaatattgtcggaatttatctgattaactaccgggccgtagacccggcagttattttaaccacgacgtgtcgccagccagcagagcagggaaccgccgcagaccatcagcgcgccttgccagaacgagaacgacagcggggcgctgagcagcacggctgcaagcgctgaggaaagtacaggcgtaaaatacgaacctaccgccataatggtgacattgccatgcaatataccgacattccatgcagcataagcaaatcctaaggtaaatgccgcagagatgagtttaatcatgacgggcgtgctaaatatcatttctggttgtggcgtaagaaaatagtaaacccacagacttgctcccgttagcaggacaaaaacggtaattccattaaatccgcgtgcgtatttattcgttactgtgcaataggctgcccagataaacgcaccaatgaacgccaggaaataactcaatgggctggtggtgatattattgatgatttcatcataatgtaacccattgtcaccgcctaacacccaacagacgccgacgagggctaataataatccaggtacaatcaaccagttggttttctgaccattaaacagaatggcaaagagaattgtcaggctgggccacagatagttcaccatacccacttcaatcgcctgatgatgggtcgccgcataccctaaggaaagcgccagacagatttcatagctgacgaataacagactcccggcgagtaaatagcctttcgggatttgccgaatacgcggaaatccaaccgtgaagattaacagcagcccgcttaatgaatagatagcagctgcgccgccgaccgggccgagcccctcactgacaccgcgaatcaatcctaccatcgtgctccacaggacgatcgctatcagccctatgagcgttgctttttgtcgtgtcatgctcgctgttttgtctctcttgccgttaaaaattaagctgaattttatagcatttttttaactggcctgtcaggcagtggtgcgtttttctaccgctattgaggtaggtcaatttgcgaaggcggattattttgtggcaaacagatgttctttttgatttcgcgcaaaaagattcagaattttactgttagtttcctcgcgcagtaatacccctgaaaaaagaggaaagcaatggacgtcagtcgcagacaattttttaaaatctgcgcgggcggtatggctggaacaacagtagcggcattgggctttgccccgaagcaagcactggctcaggcgcgaaactacaaattattacgcgctaaagagatccgtaacacctgcacatactgttccgtaggttgcgggctattgatgtatagcctgggtgatggcgcaaaaaacgccagagaagcgatttatcacattgaaggtgacccggatcatccggtaagccgtggtgcgctgtgcccgaaaggggccggtttgctggattacgtcaacagtgaaaaccgtctgcgctacccggaatatcgtgcgccaggttctgacaaatggcagcgcattagctgggaagaagcattctcccgtattgcgaagctgatgaaagctgaccgtgacgctaactttattgaaaagaacgagcagggcgtaacggtaaaccgttggctttctaccggtatgctgtgtgcctccggtgccagcaacgaaaccgggatgctgacccagaaatttgcccgctccctcgggatgctggcggtagacaaccaggcgcgcgtctgacacggaccaacggtagcaagtcttgctccaacatttggtcgcggtgcgatgaccaaccactgggtggatatcaaaaacgctaacgtcgtgatggtgatgggcggtaacgctgctgaagcgcatcccgtcggtttccgctgggcgatggaagcgaaaaacaacaacgacgcaaccttgatcgttgtcgatccccgttttacgcgtaccgcttctgtggcggatatttacgcgcctattcgttccggtacggacattacgttcctgtctggcgttttgcgctacctgatcgaaaacaacaaaatcaacgccgaatacgttaagcattacaccaacgccagcctgctggtgcgtgatgattttgctttcgaagacggtctgttcagcggctacgacgctgaaaaacgtcaatacgataaatcgtcctggaactatcagttcgatgaaaacggctatgcgaaacgcgatgaaacactgactcatccgcgctgtgtgtggaacctgctgaaagagcacgtttcccgctacacgccggacgtcgttgaaaacatctgcggtacgccaaaagccgacttcctgaaagtgtgtgaagtgctggcctccaccagcgcaccggatcgcacaaccaccttcctgtacgcgctgggctggacgcagcacactgtgggtgcgcagaacatccgtactatggcgatgatccagttgctgctcggtaacatgggtatggccggtggcggcgtgaacgcattgcgtggtcactccaacattcagggcttgactgacttaggcctgctctctaccagcctgccaggttatctgacgctgccgtcagaaaaacaggttgatttgcagtcgtatctggaagcgaacacgccgaaagcgacgctggctgatcaggtgaactactggagcaactatccgaagttcttcgttagcctgatgaaatctttctatggcgatgccgcgcagaaagagaacaactggggctatgactggctgccgaagtgggaccagacctacgacgtcatcaagtatttcaacatgatggatgaaggcaaagtcaccggttatttctgccagggctttaacccggttgcgtccttcccggacaaaaacaaagtggtgagctgcctgagcaagctgaagtacatggtggttatcgatccgctggtgactgaaacctctaccttctggcagaaccacggtgagtcgaacgatgtcgatccggcgtctattcagactgaagtattccgtctgccttcgacctgctttgctgaagaagatggttctatcgctaactccggtcgctggttgcagtggcactggaaaggtcaggacgcgccgggcgaagcgcgtaacgacggtgaaattctggcgggtatctaccatcatctgcgcgagctgtaccagtccgaaggtggtaaaggcgtagaaccgctgatgaagatgagctggaactacaagcagccgcacgaaccgcaatctgacgaagtggctaaagagaacaacggctacgcgctggaagatctctatgacgctaatggcgtgcttattgcgaagaaaggtcagttgctgagtagctttgcgcatctgcgtgatgacggtacaaccgcatcttcttgctggatctacaccggtagctggacagagcagggcaaccagatggctaaccgcgataactccgacccgtccggtctggggaatacgctgggatgggcctgggcgtggccgctcaaccgtcgcgtgctgtacaaccgtgcttcggcggatatcaacggtaaaccgtgggatccgaaacggatgctgatccagtggaacggcagcaagtggacgggtaacgatattcctgacttcggcaatgccgcaccgggtacgccaaccgggccgtttatcatgcagccggaagggatgggacgcctgtttgccatcaacaaaatggcggaaggtccgttcccggaacactacgagccgattgaaacgccgctgggcactaacccgctgcatccgaacgtggtgtctaacccggttgttcgtctgtatgaacaagacgcgctgcggatgggtaaaaaagagcagttcccgtatgtgggtacgacctatcgtctgaccgagcacttccacacctggaccaagcacgcattgctcaacgcaattgctcagccggaacagtttgtggaaatcagcgaaacgctggcggcggcgaaaggcattaataatggcgatcgtgtcactgtctccagcaagcgtggctttatccgcgcggtggctgtggtaacgcgtcgtctgaaaccgctgaatgtaaatggtcagcaggttgaaacggtgggtattccaatccactggggctttgagggtgtcgcgcgtaaaggttatatcgctaacactctgacgccgaatgtcggtgatgcaaactcgcaaacgccggaatataaagcgttcttagtcaacatcgagaaggcgtaagggggcgaacagatggctatggaaacgcaggacattatcaaaaggtccgcaactaactccatcacgccgccttctcaggtgcgtgattacaaagcagaagtcgcaaaacttatcgacgtttccacctgtatcggctgtaaagcctgtcaggtggcgtgttcggagtggaacgacatccgtgatgaagtggggcactgcgtcggggtttacgataaccccgccgatctgagcgccaagtcctggacggtgatgcgctttagcgaaaccgaacagaacggcaagctggagtggctgatccgtaaagacggctgtatgcactgtgaagatcccggctgcctgaaggcgtgcccgtctgctggtgcaatcattcagtacgctaacgggattgtcgatttccagtcggaaaactgcatcggctgtggttactgcattgccgggtgtccgtttaatattccgcgcctcaacaaagaggataaccgggtatataaatgcacgctctgcgtcgatcgcgtcagcgtcggccaggaaccggcttgtgtgaaaacctgtccgaccggggctatccacttcggcaccaagaaggagatgctggagctggcggaacagcgcgtggcgaaactgaaagcgcgtggttacgaacatgctggcgtctacaacccggaaggggtcggtggtacgcacgttatgtacgtgctgcatcacgccgatcagccggagctgtatcacggtctgccgaaagatccgaagatcgacacctcggtaagcctgtggaaaggcgcgttgaaaccgctggcagcggctggctttattgccacttttgccgggttgattttccactacatcggtattggcccgaataaggaagtggacgatgacgaggaggatcatcatgagtaagtcgaaaatgattgtgcgcaccaaatttattgatcgcgcctgtcactggaccgtggtgatttgcttcttcctggtggcgctgtccgggatttcgttcttcttcccgacgctgcaatggctgacgcaaaccttcggtacgccgcagatgggacgcattttgcacccgttcttcggcattgcgattttcgtcgcactgatgtttatgtttgtgcgttttgtgcatcacaacatcccggataagaaagatattccgtggctgttgaacattgtcgaagtattgaaaggcaatgagcataaagtggcggatgtcggtaagtacaacgccgggcaaaagatgatgttctggtcgatcatgagcatgattttcgtgctgctggtgaccggggtgattatctggcgtccgtactttgcgcagtacttcccgatgcaggttgttcgctacagcctgctgatccacgcggctgcgggtatcatcctgatccacgccatcctgatccatatgtatatggcattttgggtgaaaggatcgattaaagggatgatcgaagggaaggtaagtcgtcgctgggcgaagaaacaccatccgcgctggtatcgtgaaatcgagaaggcagaagcgaaaaaagagagtgaagaagggatataatctcttttgaactttaagctgaaaatggcgctgtaaaaggcgccattttcatattgtagacaacgtaggctttgttcatgccggatgcggcgtgaacgccttatccggcatgaaaacccttcaaatccaatagattgcagtgaacgtgtaggcctgataagcgtagcgcatcaggcaatgttgcgtttgtcatcagttctaaatggcgctttataaagtgccatttttttattgcgtaaccagacggcgtaatcgcgacacatccactgttttttctgcctctgccagactccaggcgttttgcagattcagccacatttgcggcgaactgccgatcaccacggaaagtttaatcgccatttctggcgtcaaagctgcttttcctgtcagcaatcggcttgccgttgagggagcaatttccattgctctggcaaactcgcgcaggctgacattaagttcgtccagtgattcctgaataatgtcccccgggcggggatgattggccattttcattagtgtctttactctcagtagcgttccttcactgggaacactatcattattgttccttcctacgcaacaataatccatttagccatttcatgttggagagtgtgcgatgctgcgacccgaacatggcagtcgcagcaaaggcctcttagtgacggaaatcaatcaccatgcggccacggattttgccttcttccatctcagtaaagatggtgttgatgtccgctaacggacgcagggcgactttcggcaccactttaccttcggcggcaaactggaaggcttcagttaaatcctggcgcgtgccgaccagcgaaccgaccacttcaataccatccagcacaagacgtgggatatccaggctcatagactccggcggtagaccgacagccacaacacgaccgcctgcacggacagcatcaactgccgagttaaacgcagctttagctaccgctgttaccaccgcagcgtgagcgccaccagttttctcctgcacaattttggcggcgtcttcggtgtgtgagttaatcgctaaatctgcgcccatttcggttgccagttttaactgctcatcattgacatcaatggcgatcactttggcgttaaagacattcttcgcgtattgcagggcgaggttacccagaccgccaagaccgtagatagcaatccactgccctggacgaatttttgacagcttaacggctttgtaggtggtgactcccgcacaggtaatgctgctggccgccgccgagtccagaccatctggcacttttaccgcgtaatcggcgaccacgatgcactcttccgccatcccgccatcaacgctgtatccggcatttttaactgaacggcagagcgtttcgttaccactgttacagtattcgcaatgaccgcatccttcgtagaaccacgccacgctggcacgatcgcctggttttaatgaggtgacacctggacccacttctgccaccacaccgatgccttcatggcccagaattacgccggttttgtcaccaaaatcgccattcttaacatgaagatcggtatgacatacaccacaacactccattttcagcagggcttcgccatgtttcagtgagcgcagtgttttatacgtaacgtcaacatgatgatccttcgtaacaactgcagccttcatagttcctccttttcggatgatgttctgcatagcaggtgaggcaaatgagatttattcgccactacccagtatggatgagatctgaaaaagggagagggaaatagcccggtagccttcactaccgggcgcaggcttagatggaggtacggcggtagtcgcggtattcggcttgccagaaattatcgtcaatggcctgttgcagggcttcggcagaggttttcaccgccacgccttgctgctgcgccattttgccaaccgcaaacgcaattgcgcgggagactttctgaatatctttcagttccggcagtaccataccttcgccgttcagcaccaatggtgaatactgcgccagcgtttcacttgccgacatcagcatctcatcggtgatacgtgacgcgccggaagcaataacacccaggccgatgcccgggaaaataaaggcgttgttacactgggcgatagggtagattttatctttccataccactggattaaacgggctgcccgtggcgaccagcgcgttaccttcggtccaggcgataatgtcctgcggtgtggcttccacgcgtgacgtcgggttagacagcggcatcacgatcggacgcggacagtgtttatgcatctcacggatgatctcttccgtaaacagcccggtctgtcctgagacgccaatcagaatatctggttttacattgcgcaccacatccagcagtgacagcacatcgctgtcggtatcccagtcactgaggttttcgcgcttctgcaccagtttggtctggaaaggcagcaggttcggcatcttgtcagtcagcaagccaaagcgatcgaccataaagactttctgccgcgccgcttcctcgcttaatccttcgcgctgggtctgggagatgatcatttcggcaatgccgcatcccgctgaacctgcgccaaggaagacgatttttttctcgcttaactgaccacctgccgcgcggcttgctgcgatcagtgtgccgactgttaccgccgcagtgccctgaatgtcatcgttaaaagaacaaatttcattgcgatagcggttaagtaacggcatcgcatttttttgagcaaagtcttcaaactgcaacagcacgtctggccagcgttgtttcacagcctggataaattcatcaacgaattcatagtattcgtcgtcagtgatacgcggattacgccagcccatatacagcggatcgttaagcagctgttggttgttcgttccgacatccagcaccaccggaagggtatacgccgggctgatgccgccacaggcggtatagagcgacagtttaccgatcggaatgcccatcccgccgatgccctggtcaccaagccccagaatgcgttcaccgtcagtcaccacaatcactttaatattatggttcggcacgttttgcagaatatcgtccatattgtgccggttctggtaagagataaacacgccgcgtgaacggcggtagatctcagaaaaacgctcacaggctgcgccgacggttggggtataaataacaggcatcatctcatcaagatgattgtttaccagacggtagaagagggtttcgttagtgtcctggatgttacgcaggtagatgtgtttgtcgatttcggttttgaatccctgatactggatccatgctcgttccgcttgttcttcgatggtttcgaccacttccggcagtaaccccagcaggttgaagttacggcgttcttccatgctgaaggcactgcctttattcaacaacggaaattccagcagtacagggccagcgtaagggatataaagcgaacgctgtttttttgtttttggttccatgtcactcactcttttttgaatatccatccctggggggcttttatcgtctttgctttaccgccagggcgtcggcctcaagtataaagcagataaaaacaaaaacaccattgcgcaggcaatggtgtttaatcgtcattgaggactgatggttatgaattacttttcagcggggcgttttctgccggttgggttatttactacgctggatttgtcaccttcggtaactattttgcgctggttagaaattttatggtccagtccaagaatatgacgtgcctgacggttcgatttcattttaactcctcaatcctgtagctagttttaaggacaacatcgccgtagcgaagaaacacgtgctaaacccctaaattaggttgccgatcaagcatagcaccttaaagcgtagggtgctggccactgaccacataattgatcgtttgctggtagatatcactgaggatgtcgttatcagaagcttcaacccatttggtcagctccatgagaatgtcatcttcagtgacaacaccatgctgtgcccgaaggccttgctcaatggcattaaccagagcgggttctgctgttgaattttctgcctgataataagtaaacatagtgattctccgtgtctgtgtatttatggtgtctgctacggatcgcagatttataaagcacattcagcatggcaaatatttgccgcttcgttgttaagattagtcctggttgatgatttttatattttaacaccatgatattcatagggattgtgattggtatgatccgattaatattgatacaatatcttttgggttatatattcccggtaatctattgtgggaatttaatttaagtgcagaagtaatattttcgccggattttattcggaatatcctgctgatcctcgtgctgtttctcacgtagtctataatttcctttttaagcccacaggagagcaacaatgacaatccataagaaaggtcaggcacactgggaaggcgatatcaaacgcgggaagggaacagtatccaccgagagtggcgtgctgaaccaacagccgtatggatttaacacgcgttttgaaggcgaaaaaggaaccaaccctgaagaactgattggcgcagcgcatgccgcatgtttctcaatggcgctttcattaatgctgggggaagcgggattcacgccaacatcgattgataccaccgccgatgtgtcgctggataaagtggatgccggttttgcgattacgaaaatcgcactgaagagtgaagttgcggtgccgggtattgatgcctctacctttgacggcataatccagaaagcaaaagcaggatgcccggtctctcaggtactgaaagcggaaattacgctggattaccagttgaaatcgtaaagcattgccggatgacgcgtcaggcgcgtgaatgcctgatgcgttgttagcatctctacagcgcccgccagcaccggagctcacgtccgtcctcccttattgctaatgattgccggacttcacatccgtgggttgccagcgggcaacgttcgtagaaaaaacagccttgcggcaacgtgcggtttcccggcagatccgttttacgtaatgcccattcttcctccagcggtttatcaatggcggggagggaatccagcaataatcgggtgtatggatgtgcaggtgccgtcagcacctgctgcgcgtcgcccagttctacaatctgcccgagatacatcaccgccacccgatcgctcatatgacgtatcaccgagacattgtgtgaaatcagcacataggtcagcccgtgattttcctgtagcgttaccagtaaattgaggatctgcgcctgaacggagatatccagcgcagaggttggctcatcaagcacaatcacgtcaggctgcgaagagagtgctctggcaatggcgatacgttgccgctgcccgccggagaacgcatgaggcaggcggtcgagatactccggacgaatacccacctgcacagccaactcctctgccaacgctcgccgctgttgttcactactacgcttagctatccagagcggttctgtgatgatgcgccacaccggtaagcgcggattaagcgaagagagcgggtcctgaaacaccatctgcataatgcgttgtgagccagaacggatgtactgcccgtggctcggttgcagcatacccattaaaagctgtgcgagggtgcttttgccgcagcctgactcgccgacgatccctaaggtttcaccacggcggatctgtaaatcaataccattaatggcatgaacatgttccgtagttttaccaagccagtttttacgggccgggaaattgatatggacgtcgcgtaacgttaataacgtgtcagacacttataacctcctgctgcggataccaacaggcacagcgctggttgttgtcaccacacgctgtcagcgccgggacgttttcacactgtgcacctgccgcatagcaacgatcgcgaaaagcgcagccgtcaggcaaatgggtgaggtttggtaccgtccctggaatggcgggtaatagctggcgtggtactccatgttctggtgcgcattgcagcaaaccaatggtatacggatgccggggatgatggataacgtctgccgtcacgccgctttcaattacgcttccggcatacatcacgtaaacgctatcgcacagttgcgacaccacggccatatcatggctgatgaacataaccgcagttccactggcgcgggctttatgtttaagcaaatgcagtacctgcaactgcaccgtgacgtccagcgccgtagtcggttcgtcggcaataatcaattgcggctcgcaggagaatgccagcgcaatcattacccgctggcgcataccacctgaaagctcaaacggatagcgcgacataacttccacggcatccgggatttgcatctcttccagcaggtcaatcgctttagctctggcttcccgacgacttattggttgatgatggcggatcacgtccatcatctgaagacctattcgacgtgtcggattgagggcggtcatcggttcctgaaagatcatcgccactcgtgcgccgcgccactgacgaagctgtttttcccgcgcgttaagaacatcttctcccagcagggaaatctgcccccgatgtacgcaataactgcccgtcggtagcagacgcataatcagcattgcggtgactgatttacctgagccggattctcccaccagaccgacaatttcaccgcggttaatctgcaaggacacattgttgagcgcgtgaacatcaccgttaaaaccggggaaactcaaatgcagttgttgaatgtccagaacgggttgggtcatgactgctttcctcctgctttcgggtcaagcagatcgcgaataccatcaccaaagagattaaacccgacggcggtaagcaaaatcgctgcccccggaaatgcgcaataccaccactgatcgagtacatagttgcgaccatttgctaccatcgcgccccattcagcactcggttgttgagcacccaggccaataaatcccaacgtggcggccattaaaatcgcgctaccgatatccagcgatgcctgcacgatcagcggcggtagggagttacgtaaaatatgccagttgatcagatgccaacgagacgcgccaaaggttttcgccgcctgaacataggtatactggcgtacaactaatgcttgcccccgcgccaggcgcacataaaagggaattcgcacaatagcaatagccagcatggcgttaaacaaactcggcccgagagcggcagccagtgccattgtcagtaccaacgaaggaatcgacagcataatgtccatgatgcgcatgatgatggcgtctgcgcgtccaccaagcacaccggatagacatccgagtagcgaaccaatcatacccgcaatggcaaccacgactaatccggcgagaattgattgctgactgccgaccagtacgcggctaaacagatcgcgtcccacttcatcggtgccaaaccagtgcgccgcagaaggcggcaaaaggcgggcggttaaatcaatggcgttgggatcatgcgtcgccagccacggtgaaaaaatcatcatcaatagcattaatacaatgatgactgcgctggtcacggtgagcggactgcctttcagcatccataccagttttgcaccgttaaatcgcgtttgtttttgtgggcgtacggcggacgtttcctcgcttagcatcattcaccacctccacgtccgatacgcggatcaatccacaaatagagcaaatccaccaccaggttgaccagcacataagcaaatgaaaccacgacggcaaagcccatcactgccgggaagtcgagcgcctgtattgatgttactacccatgcacccattccgggccaggcaaaaacggtttcggtgagcactgcgccatacaacaaatcgcccagcgccaaacccaatacggtaatcgatgggatcaacgcattgggtagcgcataacataaaacgatataccagccgggcaagccgctggcccgggcggtacgaatgtagtcttcactcaattgttccagcatcgctgagcggatctggcgagcgacaattcccaggtgaacgaacgccagcgttaatgccggtaagatgagatgttgcaacgcattgaagaagacttcaccgttgccttcaagcagcgcatcgagcagataaaagccggtaacgtgcgttggtggatccagccagtcatcaagccttccgccgccgggaagaatttgcagatgaccataaaacagcacaatgacgcccagcccaagccagaacgcaggtgtggagattccggtaatggccattattcgcaccagatgatccagccagcgatttcgccagactgcagagagtatgcccagcgggatgccaatcaggagtgccagcagcagggcaccaaaagccagctccagcgtcgccgggaaaaatatacgcaactcttccagcaccggacgcccggtacgaatggatgttcccaggtcaccatgaaacaggtcgctgacgtagcggtaaaactgtacatacagtggctggtccagtcccagttgctggcgaatattttccacgatagcatcgctggcgcggtcacccgccagtaaccgcgccggatcaccagggatcagatgcgagataataaacgtaatcacgcagacgcccgccaccacgagcaccagcccccagcagcgttggcgtaaaatactccagaaggtcacgttatttactcatggtattgatattgaagacctgttccagcatgggattgaacacaaagcctttcacctctttgttcatcgccagttggtagtttttctggaacaggtacacataagcagcgtcatcaatgacgattttctgtgcctgctggtagtcccgggtacgctgcgtctggtcggtggtcgcaagcgcattgcgcagtaacttatcgacctcactgttttcatagaacgagcggttacccggcagaccttttttgtctgactcaaaccagtaattcataaacatatacgggtcggcaaaatccggactccagttgccaatcgcaatgtcgtaatcacctttacccactctgtcgcgcatggtggcgttcgccagcttttccagcttcactatgatgcccagcttgttgagactggattgtgtcgccagagcaataggctcccagttcggatcgttatcggagtagagaaacgtcaggctggtgggtttgctcgtcactttatcccattcggctttggctttcgtttcgtcatggttgtattgcattgccgtcgcatcgtagccccacatgccttccggaatcgggccgcgcatctgttttccgttaccactcagaatgccgttaaccatgccctgataatcggtagaccaggaaatggcccgacgcagatccgcctgattaagaggcgctttgctgttattcagatacagataggtaacgcgcagtgacggatactctgccacattgactttattttcctgcttcagggcgttgagttgatccaccggcagcgcatcggcaatgtcaatgtcgccacgggagagctgcaggcgacgggaggcactttcaccaataatttttaccgatacccgtttgaagttcggtttattgcctgggtaatgcggatttggcaccagaactaattgctgacctttttgccagcttttcagcataaatggtccggaaccggcggtattttgcgcgaggaagccgcgagcatcatccgctgcatgttcctttaagaccgccggattgataatggatgcaccgtcattcgccagcgtgtagaggaacggtgcgaatggttggctaagggtaaacttcaccgtatgttcgtcgggagcatcaatctttaaatctttgggaaatgcttctgctggcccctggccgatttttagtagccgctcaaaagaaagttttactgcttcggcagtgacaggtgtgccatcggcaaatttagcattatctttcagggtgaacgtccactctttttgatcgtcagacgctttccagctacttgccagatcgccttcaacgtcggttgagcctttatcaccgtccgttttgtactgaaccagccgctgataagacgggtaggtcactgtccagtcgttattatctattgttaccgccgggtcgagggtttgtggatcggcggccttaccaatcaccagcatatcttttggtacggcggcgtgcgcaaccgggaaatttgtggcaaggacgagcgcgagcaatgtgggacgaaacgatatcgatctcttcatgacagtttcctgattaactgacgtgctgtgtgccaggggatataaaacaagagaattgatcagcgagcagagggtaactcgctgcctggggtaattcgaagtgccaccattcgctggagataccgacaaaaccgccaccagtcattatcgcattcagcaacagccgattgcgctgagcggcgggcgggacggaagggtgataggcatgggagcgctcgtgcatttcatcgaaccctgcgcccatatcgaggatgttcccgtgctcatcacgaagcgtcaggtcgatcgccgtgccacggctgtgattagaaccgaccgtcacatcaacaacatattgcgggtctgggcaggcttgccacaacatcgcctgtgcttgttgtgggcgatacgcatcgtaaatcaccagttgtaaccctgacagctgggcgatgctgatacttttcgccagcgcggtaatcgcatccttgtgtaacagacaacgcgcttgctgataaatagctttacctgtgatgttatcagcgcaggcgtatttcaattcgatctccagatcagggaagattacggctaaatcaaccagttcggtggtatccgacataaacggttcctgtataagacaaaaattgctgcgctttccgcttatgcagatctcatgccatgccgggataagcgccagaatgctggcttaaagttatattttttaacttttgatcaacatttgtgcagcgtagtgcagttttggtgcaagaggggaagttaaggaaggaatctcccggaatcgtagctgaaatcacagtatttaagtgacagtgtcacgttaaatgaaaacccgcgagtgcgggcgagaggaatttgtcagattttcagcggtaacacgctgctcatccagcctggaatttcttcggcgggtagggggcgggaaaagaaatatccctgaataacgcgacagtggatcttgcgtagcatctcaaattgctctttggtttcgacgccttccgccacgacggttaaattgaggctttgcccaatgctggtaatggcttcgagtaggcagcctggcggctgcggcttgtcatggcctgaaattaccgttataaaaacagacaatatcattgtctttcaggtagttatatgtcccgttcagctaaaccccgtaaacgaaaacctgcccctcaaagaagcaaacttccccgctatgtcgtgaagcttcacgacgatgacttctttgacgaagaagacgcagaagctctgcgctttgataattttgacgatgccgttgagtgctgcgcagacctgaatattcccttctttgtggatgccggaaacaaaaagctggtcttctggtttgtacgtgttgatgacgaagggtatcctgaaatagcccgctgcacggagcgggagtttgcgaccattcttgccggtatcagcgccggcggcatgtactgcccggagtgtggcacggttcactggccggacggagtccccccgcccttctgatgcttccccgttttgccgacatttttcagcagggaaaccgctggcttaactggctggagaaacaaccggaaggttcagtgcgtccggtagtcattgagtctgtgacaaaaatcatggcctgcgggaccacgctgatggggtacacacagtggtgctgttcatctccggactgcagccacataaaaaaggtctgcttccggtgtaaaagtcgctcctgcccgcactgcggagtgaaggctggcgcacagtggatacagtatctgctgagtctggttcccgactgtccgtggcagcatattgtgttcacacttccctgccagtactggtccctggtgttccacaaccggaggttactggcagagatgagccgcattgctgcggatgtgatacaggaaatctgccgccaggcagatgtggtgccggggatattcacggtgatccacacatggggacgtgaccaggagtggcatccgcacattcacctgtcgacaacgaccggcggcgtgacatcagaccacacctggaaaaaccttcatttttacgcccgtaaggtgatgagtatgtggcgttaccggataacgcggttactgtcacggaaatatccggacctggtgataccggatgcgctggcagcagaaggaagcagtaaacgggactggaatcgcttcctggacagtcattaccggcggggctggaatgtcaacgtatcccgggtgatggataacgccacacatgtggcggtgtacttcggctcttacctgaaaaaaccgccggtgccgatgagccgtctggagcactatgctggtcaggatgaaattggtctgcgttacaacagtcaccggacaaaacgggaagaatacctggtgatgagtggtgatgagtttatggaaaggttctcctggcatgtggcggataaggggttccgtatggtgaggtactacggtttcctgagtccggtgaagcgccggttactggaagatgttgtgtacgtcataacggagacggtgagaaagacggcgatgcaaatcaggtggagagggatgtatcagcggttactgaaggttgacccgctaaagtgcatcctgtgcggatgtcagatgcgttttacggggctgaagcggggctaccgtctgacagagctggtcctgatgcatgagccactggcgcaacagcgggtgtgcggctgagagccgcatcggggaagttgcgtccattttcaggggaatggagtaaaaaaaccatcagtgatatacagtatcactcgataagatccatttaattgatggcggtgcactcatggcacgcaggcagtgttgaataaacatccgtttttgggtgttttttaatctttttgggatttaaattcctatcgatcaagtaaggcaaggatgcgtttttcggtcagacaacgatcgacaaaacttttgtcaattttgatttccgttaccggaagactgactaagcgggataatccggaaaagcccgtaccaaaatcatctaccgataagcccacgcccatatcacgcaggatctgaatgcgcttaaagatttcggtatcgtgttccatcatcatgctttccgtgatttctaccgtcagctggtggccgtcaataccccaggcgtgcattgcatcagacacctgattaggcagttgattactgcgaaagtgcagcgccgacaagttcacggataacgccgggatatgaatattctggctacgccattctgctaactgacggcaagcttccgcgatgacccagcgcccaatattttcgatttcaccaatctcttctgcgagaggaataaaccgtgaagggggcacatgaccatgcaggggatcgtgccagcgagcaagggcttcgatgccgtacagttcacccgtttctgcgaagatttgcggctggtaaaccagtttcagttggttattgctaatcgcttctttcagcgctgcgcctaaaaccaaacgctcttttaccatttcgttcatcgccgggctgaagaactgccagccgttaccgccattcttgcgaatataatccattgcattgtgagcagtggagagcaagtaatcgcggtttttacccaggtcgtagctgatgccaatactcaaggtaagcgggaagggtttatcgtcaatcattatcggcttgctgaccacattccgtagctcatcggcgatttgggtaatgttactgacgtcgttttcgaggctcacgaggacaaactgcgtaccttcgatacgacagagatactgatccggtttgagtttttcacgaaagcgattgaccacttccagcaatgcctgatcggcccacgcatagccaaggctatcaatcacatcctgaatatggtcaacaccgatgagatacaccacgggagagacggctttgtcgaccaggtcatcgaggtaattgtgcaggttattgcgatttggcagaccggtcatcggatcaaattggatgagttgttcaatatgctgacggcttttttcctgttccagcgccagcgcggccatatgctggctgatatctgccacgcgttcgataaaggcgctggtttctgctcctgacgaggttttaatttgcaggatccccgcaggcgcgccatcacgctgacgaatggtcgctgaccagctttgcgcattttgaatttctgcaccgtgggaagatgacgcccagtgtatcggcatcccgttgcgcagtgcgaacagcgaaacatgcgattcgttgagtacagattcgatgttacgacaaatgatttcccccatttcatgaaatggcgggctgctgcacatggcggcgagaatattgccttcaagctggcgaatctgccgttcttcggtgatatccgagaaagtcattaccaggttctgcagatgcgcgagcacgtcataaaccgggctgatagaggctttaatccagattttttcaccggtgcgcgtcaacagcagaaattcgtcctgatcgcgggcggttttccatagcaactgttgtaaacgaatgcggttatcggcagggaattcaggaatgttcaggagtgtatcgggctgcataccgctggcttcgctaatgcagtaaccaaacatttcggtaaatgcgcgattgcactgcacaatatggcgttccggatcgaggacaatcaccggtcggtcgagatggtcaacggcaataatcaattgtcgggtctgttctttttgcgccatttctacgctggcatcccgtaccagcgccaggtaataaactttcccctcggcgctcactttcgatagcgcaaaacgggtccagattttactgccgtcttttttctccagctgcagctcccgactcatcccctcaacacgcgctttaccgccttcacggttgtgacgaatgtattcaggatgcgcaggacgcaaatcccgcggaatcagcatatcaatgttattgccaatgacttcttcacgtttgtatccccagagcttctctgcggcggggttgaaaaacatcacttcatcattttcgttaattaacaccgcacccatcatattttgctcaagggcggggaaaaaaatgccatcggcggcattatccgcatcggttagcttcatgattacctctgcatcctggcgcatctaaagactggctttccagagttcaacacggtttctacctcgtcttttggcgatatacagagcttcatcggctatttgaatgaggcgctcatagtcaggatgaccattaaacatggcggcaccgatggaaagtgagagggcaatatcttcgccgtttgcggctttcagtttggttttctccacccgactgcgaatacgttctgcggtacgtaacgtttcgttttcagaagcttcagtcaaaacaatgataaattcatcgcccccgtagcggaaaacataatcactactgcggacgttgtcataaaaggcctgagagactttacgcagaatttcatcaccagtgttatggccccacgtatcgttgatctctttgaatttatcaacgtcaataatcagcactgacagcggtgtaccggtccggttagcatgggcaatttcgcgtttgaagatagtcggtaggaaacggcggttaagtaatttcgtcagtacatccataccgacttcgtggcgcgatacttcttcaaacaattcacgcagcaaggtaataatttgcgatacggtatttcttatctgtaataaaaatttcacccgcagacttctgttattcaaatttctggtgttacgcatggtttgattgaaaataccgtcgaaatcctgaatcagacgggagatatggcctacttcggcaataccactaaaataatgtcgacctttatggttaaaccacaggccaaaatcagcctggcttaaaggcaaactactgcctaaatcagaatccagcaggattttatagataatatctatttcccatgaaagtattgaggctatttgccgttctttttcttcttcggcgttttccagtaacgagaagatacgatagttttcatcttcctttgaggcactactgtcactaaaggtaaacgcgcgagtcatcacttccatcgcgatatcaatactgttaatcgagaaatggtagacctgaagtttttctgcggcggaataatccgaagagaagatcaccggatagaggatttttttcagcacccgaaaccccatctcgacaatttctaccggaattcctatgcgggcatgcacttccgcgacggtatgctggatttgtattagcctttcgacatcgtcaacctgggcagaaagcacgttaataatccagcgttccatcgcactcttcaactgccgctcaacttgttcattactcaagaattcttcggcatgcgggtcgatgcggacaattcgataaaactcgatactcagataatgagcatgcgcaacggcaatttccgcggctttagcacgaatgggcggatctgcctgttcgacaagtccggtccactcatctttcattcttttaaaatacatctccataattcacacccttataaggctgggaaatcagacggaatcaaaatgaaacgcaacgtgcgagatcgactaactgcaccatattctcctgaaatatgaagatatactgaaaagaaataagcgatttaggacagtttcaatctacgctactgttcttcagaagagtatagcccatcgtaattatttttcggtgacagcgaatatcgtatggtttttcatattcatacatttttattagggatttatggctgtttaactaagtgtggttaatttgacttaagtaagcatgattattagtgggatagtttaagagggtaacaagccggtgggtaaagcaccggcttgttacaaagtaagaatgggagtttaactgccccagcgactttgcagatagctgaccgcttgttgagtctgcggtttattcagatagtcctcacggaacaagatggtgccgctaatttcgggcacagcatcgttaagatcgagctgctttttcagttccggtacgccgccgttaatcatccagtctggctctatctttgaaggttcacccactttatagaaggcgataccgatatacaggcgggtcctggtcggtttaacgacatccgcccaccattttgccaacacgtcataacgcgcggcactccgtgagaacggccagtaaatttggggagcaatgtaatccagcaatccttgttccacccatcgacgggtgtcagcgtaggattcgtcataggctgccgcgcctcgggtatcggaaccgagcggatcgtgtgatcggttacgccacacgcctgccgggctaacaccaaattcgactcccggcttaatgcttttaatggtgtgcgatacctttgcaattaactgctgagtattgttgcgccgccagtctgcttttgacgcaaatgcgcctccgtatttacggtacgtttcgttatcatttagccgtgaacccggtgactccgtatagaaatagtcgtcaaactgcacgccatctacgggatagcgggaaaccacttctgcgactattgatgtgatccagtcctgaacctcagggatgcccgggtcgaggacaaagcgatcgccagacgttctgatccagtcgcggtgttgcacatagacgctcgccggttgttgagacagagtgctattcagttccctgatagtactgggcttcgtattaaccgatacgcgataggggttaaaccaggcgtgtactttcatcccacgcttgtgggcttcgtcgagcataaattgcagcggatcgtaacccggattttcaccaatcttaccggtcataagatcggaccacggcaaaattttcgatggccacagggcggtaccgtccggcttgacctggaaaaagaccgtgtttatgccgagacgttgcagatgatccagtttgtcgatcatcgcctgttgttgtacacgggcccggctggtggggttactaatgttaaccgaggaaaccggtggccagtcgagccgagaaaccgtggccagccagatgccacgcatcggttgtgacgattgttgcgtcgtggctggtggctttgaacctgctggtggtgtcaccatggactctggaggcgtgcttttacaactacacagtaaaagtgccagtgcaactagtatcgctggtcttctaatcgttaatttcttgtttcgggagcagatatccatatgtgctggtttccggtaaacagatgtgcgctcattctcgtacttatccccgttaagtcaatacgacagcaagcacgaaaaagggagcgatgaattatcgctcccttgtcttataaccattcagacatggttagtgtttcttgtcattcatcacaatatagtgtggtgaacgtgcacgcgggtgcaggaagaagtgaccttttggtgcgttctgactgttgattggctccagagtgacgccggtatttgctttgcctttacgatcatgaacagcatagagaataaagggcagggcaagtaccaccaggaaactaacaaccagtaattcaacatacatatcggtagaatcaccctggatgttatccggcggcaggaaggaaacaataaacgccataattgaagtcagcagaccgacaattgccacgaccagtttcacccctttaccaccagggatattaaatgtgcgttttaagtcaggatgtttaagaaccaacacaatgtagccaataaacagcatgaaataagcacacagataaatcaccaccgtcagcgccagtgcgatcaggaaggacatgttgttaccgccaccggtattggtgaggatgatcaacgcgatagacgtaatcaccagctgcgaaatgaccagcgttaccggtacgccatttttgttcattttagcgaatgccgctggcagcaggtttttctgcgctgtgacatacatcccgcgagaaggaccaacaatccaggaggcgatttccgccagaacacccagcaacagcagtgcggagatcacgcgaaccgtccactcaatttctggtgccacatgggacatcagaacggtaaaggtttgcattacccctgcggagaggttgatttcattacccggaatgaccatcgcaatagacaaaccaccaacagagcttaagcagattgccgccaccatcagcagtaacatagccaacggatagtcgcgccctgggttgctcatttcattgacgtgggttgcggatgcttctacgcccatataactcaaaatgaaggcaacaaatactaccagggtgcccactttagagaagtcagggaagaaggtcttcgaatccatttcgatagcaacgggggcaccggagtgcagataaatagccgctaatgcgatcaaaataaatgcaggtaacaggataccggcgaagaagccaactttagcaattcgcgccgtgtatttcgtgccaccaaactgcgttaatgccagcgcccaaagaatgatgagtgctgcaatagttttggtaatggggtcttcattcagcgctggccatttcaggatgtaggagagtgcccctaacacgaaatagagcatcggaataaaaccaatggcgatttgcagatagccaaatgagatcgctgcaaatccccatctcggccccagagtatttgatacccaggcgaagacaccaccttcttcccagccgtcgacggtggccatttccgcagcacaaagtcccacgggaataaaccataaaatcccgcctaatagcaggaagaagactaatgaaaagcccgatgttgcgaaggtagggtattcataaacagccattaccatcgatgccgttatggcaaagaatccaagtaatgtgagctgcttagctttacctgtctgtactgatgtagccatattatccccctaaaacggtattcctgtcggaaccgcacctgttttgttctgaagcgtattcagaacaatattttccgttgctaatgccagtgaacagactttggaaattgtcccgaaacgggttcgtttcgggacaccgttaccgttaaacgttatcaggtatgtttaaagctgttctgttgggcaataccctgcagtttcgggtgatcgctgagatatttcagggaggctttgtagtcttccagcaacagttcagcaaagtccatttcgaagccgcgacgacacataatgcgcatcaccacgatgtcggtggcttcaccgccgagagtgaaggccggaacctgccagccgcgcagacgcagacgttcagagaggtcatacagggtgtatcccggatcttcaccatctttcagtttgaagcaaaccgccgggatgccttcgtccgggcgacccgtacagatgaactcatacggccccagtttggcgatttcatccgccagataagcggcaacctggtaagaggcgttctgtactttggtatagccttcacgaccgaggcgcaggaattcatagtactgtgcaattacctgacccgccgggcgggagaagttgatggcaaaagtaccaatttgaccaccctaggtagtcaacgttgaacaccagttcctgcggcagcgcttcttcgtcacgccagataacccagccgcagcccagcggagccagaccgaatttatggcctgaagcactgatcgatttcacacgcggcaggcggaagtcccagacgatatccggggcgacgaacggtgccaggaagccaccgctggcagcgtcgatgtgcatgtcgatgtcgataccggtatcggcctggaatttatccagcgcatcgtgcagcggttgtgggaactcatagttaccagtgtaggtcacgccgaaagtcggcaccacgccgatggtgttttcgtcacaggcttcaatcatgcgtttcgggtccataaacaactgaccggggcgcatagggatctcacgcagctccacatcccagtagcgggcgaatttatgccagcagatttgtaccggaccgcacaccaggtttggtttatccgttggtttgcctgcagcttccatacgcttgcgccaacgccatttcatcgccatcccgccgagcatacaggcctcggaagaaccaatggtgttggtgccaacggcctgaccatttttcggcgcaggcgcatgccacagatcggcaaccatatttacgcaacgcaggtcgatggctgcggattgcggatattcttctttgtcgatccagtttttgttaatggataaatccatcaatttgtggacattttcgtcgtcccaggtctggcagaaagtggccaggttctgacgagcgttgccatcaagatataattcgtcattgataatctggaatgcgacatcgtcgcgcatttcgtgcagcggaaaacgttttgattctgcgatagtggaaatagacttcgcaccaaaacgtgaatcgagtagttccgaccttaaatccgttacttgcttcttatccattttaaactccttaaaatgattggatcgcattaaaaaagtaggatttatcgataaagtaagcaagtgcaaaggactcgtgtttaaataacaaaatcctaatgttatttatcgtgagatattacgcgaacaatattttttcattgaaaaacaatacaatatgaaattcttgggtggtggtaaggtgttttatgctgttatttttatgcgcattctgtgtctcctgaattatcacgtaaaaatcagaccttaaaatatcactattagtacttgattattattttgaacgcatttataaaattattacataaaaatagcgaatattgctaaaatccccgccaacgatgtgttgacggggctgttattattttggcaataatactccggtataagtatttaccggatgagaaagatattgtttaacggcagtgttaacattctctaccgtcatttgtttcaacaattgctcctgctcagtccatgctgcaggatcgtcatattgaataagactatttacaatagtgttcgctaattgttgaacgctacgctgttggatatcgaggctgcgctgaacgttttgctggtattcattcagttcttgctcactgatccctttagccagacgcttaaccatcacttcattcgctaacgttaacagttcatcatgtcgttctggttgacaagtaaaagccagcaaatgactgatatctttggcctgaggatcaaccgagaggcgagaagaaacgctgtatgctccagatgcctgttcacgaatattaacacgtagatcttttgccagtgcgacgttaaaagcatcgagcgccatacgcgtcggcagattaacaggtgtccgggaatcataacgcttccactgtgaaacctgtgccacaggttcattttgttcttttacagtaaccgatgcgttgtccgtcgcgcgagttaatggtttacctgcggctaatggcgaatcagagtgtttgattgatcctaagtaacgcgtaattaacgccacgagtttgtcttctgcgacattaccgacaatgacaaacgtgatatccgctggagatgaaaacaattggcgatcggcagccagcgcatctgcggcagtaaactgtgcaatctgattttcttgcagtaatttcgtgcggtcatcagcatagcgcgtctcatacatctgctgggcgaatttctccgctggacgctggtcgagcgttttcaacgcctgaatttgagcattttgtagcgatgcccaaatattatcgttaatcgtgctgtgggtgattcgctggttaatcaactgaaaaccaggttcagggttattagtccgcgcgctaacggagagcaacgtattcatgccactgactttactgctcatggttaccgaattttccgcactccagcgtttcaggctggaagaggagagttcgccaacgccgcttccgctaactgctttatttgccagcgcgataagtgatttttgctgcgcagggaaacttaaatcgcctttattcgatacggcaataatttgtagcttttgctcttcacccgcggattttgccagaataaccctggcaccattggaaagtgttaatgatgtcagattctccgccagcgtttctttgctgctaatttccgcctgtgggtctgcgtctactgttaacgataaatttctgcctgggaagacgtaagccgccagctttttgttggcgtactccttttccagcgccaggatagccgcaggagacaatgcttttttggcggcaacctcattgtttaccatttgctcccaaaatgcgtcctggttctttcttaactgctgccatttttccgccagactttgcacggtaatttgctgccacagacgtttcgaaagttgatatgtctcttccggcgacaagaacggcgtattatttaatgagctggatgccaggcgactggtcagcatacgtaaatcacgttcagcttgctgatcaaccgcatttttcagccaggtgaggcgggtagatttgacatcatcgagttcttcagcagaaaaaccatgctgatcaatggttgccaactctgccattaatgcattcgcagcatcctgcatattatcgtctcgtgcatttacacggaaaaacagcgactgataatcgggtgcaattttaacgctgcgcgcagtgccgccagaaatagtcttcaactcgcccgactgtatgcgttcctgcagacgttgattgaacagctgaactaacatgctccattcagcttgttcgataaagctttgctcatcgttcacttgtaccattggcaggcgataatagagtgcgatgccgttcacccggttttctttatcattaatgatattaaagcgcaggtggttttcggcttttgtcggccagacgcgattttcagctgctttgttagccggaagcttacttaaattatcctttatcagcgccagcgcttctttactgtcgatatcgccgaccacgataaaggtcatattatttggttgataccagcgttgataaaattggcgcaattgtgccggtgtgaccgtggcgacagtatccatcaggccgataggttcacggtctaaattacgggtatttgccagcaggaaagggcggcgcgcctgagaggtgcgccatttcgcatcctgatgggcacgccattcctcagtaattacgccacgttcagcgtctacttcgagtttttcaaaggttgcggcattactccattcactgaagattgccatcacttgttgcagattttgtttctgcgtagtcggcaaactcacctgatacaccgtttcgtcatagctggtataggcattaacatcgcgaccaaaacgcaggcccattgactcaaatgtttcgatgactttattacccggccatgtttttgtgccgttaaacatcatatgttctacaaaatgagccacgccgcgctcattgtcttcttcctgcaatgaaccggtatgaatttgcagccataaatttacctgatcctttggatgagcatgcggataaatcatatatcgcaagccattgtccagttgcccggtaattaacttttcatcctgcggtaaggcggcggcaatcagccgcccggggagcaacagagttgccactaacgtcagtaagaaacagaggtttctcataattatctccatgcgaaaaccgggcgaatttacccggttaagtaaaatccgaactattaaaatttcatgctgacatcaagccagaaagtacggccactggcgtaggtcgccacaccggtgttcgttgtatcaacagcggttttgctatccagtacattgagaatatcggcactgatcgtcaggttttgttgttgcagaaattgtggcgtccaggacaagcgggtgtcccaggtcaggctgctatccagtttttcgtcaacatactgcttgtaatctgaatattcgctgatgtattgcgcatttgtcttaccaaggataatgcgagctttacgcgcttcttgccaggccagcgtattcgcccacactaacccgctcggttgatgcgtgaaatccatgtttaaggagatctttaatgggttattaaaatctgccactggaacgctatcgtaagagaccagattaccgttataaaccacctggttatcaccggtattgctctcctcataaccattgtttaacgacaagttgcccttgctcttgatatagctaaagacaatttgtgggttaatatctacctggcggatatgcaggggttcggccagttcaaaactgaggctgaacgaatgcgttttggttttgccatcgttgttatattcagtaatggtggttttagtcgcgctgtcggtacgactgcttttgctgatttgatcatgcgcttcacggtaaacatagtttgcacgcgcaataacgttcttaccgattttctgctgcaatcccattgccagttcatcgttataaggcgttttcaaatcctgataacgcgtcagagttttattacctgataccgattccgtccagctattgcggatatcacgtaatcccatatcaagaatattcccgccatagtaacggttataacctgctgtaatcattgaggtttgattagcaaaaatatcccattccgtcataaagcgcggggagatattgtggtttgacagatagttgtcatagtcataccgcacgccgggcattaatgacacattacgccagctaatgcgatccgccatatacagcgtgtagttgtcaattcccaggcggcctttacctttatggtaaatggtatggttagttttctttccggcagcattaatcacataggattcagactggttatggcgttcagtccacgcatcggaatagatgtattccgcgccgaagtagggttgatgcgaaacattacccacggcgaatttttgccagtccaggcgtgttttgaaggtgtaattatctacagcctgggaaatgtgtcctaatccgccacgggtgcaacgccctgtaatatcaccatatgtacatgaaagttcggtgtaccagatgtcatgatcgtgacgggtataatcactaatatgatcccaaccaacggtggtacgcagtttggcccatgcgagctgcgtatccatatcccatgccagaccataggatttattacccatttcgcgatcagactgcgggaaggtgctggtattataatcacggctggagccggtatattttaaggttaaatcgtgggtaaagcggtcgctggcaaaccaggtaaatttgcttaatgcagtatcgataacgtttttatactgtgcccgaccggcgacaatgccgtcattcgaaacataatccgcgcgggtgatatcagactggcggcgcgataaaccggcggtaacgccgaagttatcagcgagttcctgattaaacgacaaggtataaaagttctttttaaaatctggggagtaataagtacttcctgaagagccttgattaaatgcgctcttgttattctcatcgatatgcgatgttaaccagtccgaacgcgtagtgcgataacccaatttcaccttgctatcatcagcgttgaagcgtttgatctttgcatcaattaccccgccattgaagcgaccaaattcaaccggcacaaaactgtcataaagcgtcacattgtccagtaagctgacatcaagataatacccctgtgacatcccgctaatattggttgcactactggcatcggactcattcgctgggttcaggttattagttgcactaataccgtcaatcaaataggcattctggtagggcgacgcaccgtgaatagagattttctcagggcgaatatctccctggttcaacgaggtactttgcgttgaatccatgcgtaccgcagggttggttctcagcagatcgctgatattgccattcccggtcggtaaacgctcgatgctttcactggtgtaatgcgtgttgccgtttacgggtacagggacaggagcatagaccgtcatctcttcaaaaaaatgcatgtacatgtttttgtcatcgacggcctgcgccacatcagcgccacataaaatgacgccaggaataagaactcgcttcatttatttatatctccgtacagcagggcttttattgtttttataaaaccgcgctaatgtcacaaatatcatcggccaggttccagacaccgggttgatgtgtaaccataatgacgccgcttgtgggtagtttttcacgcactaaacgcagtaagcggatagcctcttgttcctcaagatgagaggtagtttcgtcaagaaatatccatttcggacgtcgtaaaattaatcgtgccagggcgatacgttgtttttcgccgctggaaagaatatctccccagcgatcgtggtcatgaatacgcgcagccaatttcccaagaccaacctgatgcagtacttcgctcaacgatttatcgtctacgggcaggggaagtgctttacaaataatctctttcagtaagccggttttgattaacggtgtttgtgacacataccaactgtcagcaggagaagaaatatcacctttaaaccacggccagcagtgggataatgttttaagcagtgtggtttttcccgcaccagagtagcctttcagtaatagccatttgcctggcgaaacatgaaagttcaggttctctaatatgatcttattatcaggcgtacgaatactcgcatcagccacttgtaccgcatgttggcaatttttaggcttattcgtagggcgctgttcagtgagttgatggaactcatacaagcgatcgataaccgcagccagttcagcaagttcgtcatatttataaataaaccagcttaaattgttcgataccagcataaatgcctggcgcgatttcatcagtccgcccagattgatctgcccgctaataaactgcggcaataacagaaagtagggaagaacgctaagcgagcgcgaataaatattctgccagtaatcaagccaccgctgacgattcattaaacgatgccagttctctttaatggtatgaaaattgtcgctcaactcctggcgttgtagagactcagcattgcttagcgcaatcagttctgcctgcttattatgctgcacaagatttgttcgaaatgtcgcttcgctacgttgtttttccacattaagcggacgaatacgtttacccaccttatgggtaaataaagttccaccgatcacaatgagcacgacggtatagaccatatacccctggatattccattctgttccaccaacagtgaatgagagcgtacccgcgctttcccaaagaataacggtaaaggtgatcagcatgctaagtgactggatgaagccaaatgaaagactgagcgttttgctgatcagtaagagaatgtcttcagcgatacgttggtcagggttatctgtatttttatgctcgccgtagatctgcgtgaagtagtagtttttatctgcaaaccaccgattaaggtagtaatctgttaaccattcgcgccagcgaatagtcagtagtttaattaaccatgttttgtttacggatattaatacaaagatccccagcagggcagggaaccaaaggacaagctgccaaagcttatcggtttctttctggcttagcgcattgaaaaaatcattattccagtcgtttaaccagacctgaattttaaccacgccaaggatcatggcgaggataataatgattaacaacactgaagttttattattcttacgcagccaaaagggcttcaacagacagagatactttgctatcaacatacgaagcgtaatgggaatggttatcattagcgaaaattgattgtgccatccaatgattatctatggcaatgatttactgatgaaatttatttaagtatcatttaacaatatgaaatataaaggaatatttcattttcagtggttatggttatgctattgataatcaaggatattgctaatgccctgatgcataccacgtaagccaggattttcgcaagggaagatgatgatgacgaaacacccgacaggaatttatgtcgggtgccttgttaaggtcataagaaggaggctaagaatggagttaaaagagagcgttattaattattctccatttgttttgcaacatccataatgtggtaaagcggtactctgttcttagctaactctaccatggcgttcatataaggtaccatggttgaaaaaaggattttataaccttcgcaaaaataagaaacagtctcattgtttactttagtaatacgatgcttaggacaaccgccattgcagataggtttatatgcacattgctgacatttcgctggaatccgttttttttgcgctgtcagttgtacactgttcatcgttttgagttcagatttattaatgtttccaattttgtactgtggatagacaaaatggtcgcattcgtaaatgtctccattactttcaacaaccagattatccttgcaggactcctggaaaatacaactggtatgcccattccccaaaaaacggctgacaaagctttcaaactgacggatgaaaatttcacccacatcgtttttaacccattgcataaaaatggttgacataaacttgccataagccgtgggaggcacagaaaaatcaatgatacggaatgtgttctcactatgaccactgaaatcaatattcggcgtcccggtttctagcaattcgataaattgcatatgtttactgccgatagattttaaaaaatgataaacctcaagagggtaatggacattaacgttattaatgacggttaacgtattaaactctacttgatatgatttcagacgctcgatggctgctatcacttttgcaaaagtaccgttacctgaattactgcgtctgtaacggtcatgtaactcctgggggccatcgatcgagataccaaccagaaattcatgttctttgagaaaggcacaccattcattattcaataaaatgccattcgtttgtaatgcattaaaaatacgtttttggcctgcatagcgttgttgatagtgaataactttacggaaaaaatccaggccagccagagtgggttcaccgccttgccaggtaaaatagacctgattgccagacgctgcgatatattgtttgatgaactctttcagagtgctgtcatccatccatttttcatgagtaaactgcgactctttttcaaggtaaaaacagtaatcacatttgagattacattgaaaactggagggcttggctgtaacgtgcatcgctatctcgctcaataaggcggcggaaaaatccgccgcatgaaggtttagttatttcgcttcgcttagtgctttcttgatattgttaaacttctcctgatttacctcgctaagcggtggctggctgctgtcgataaactctcttaccacgccttgcatctctttaacgacctacggattggcggcggcaaggttatctttttgctgtagatccgtcagtttgtagagacctaactgattgttttctactgtatagacaagcgaataatcgttatttctcaccgtataagagaattggcttaagtcctcagtgttggggttatgcgggtaatcgtctgactgatggcgaacaaatttgtggtaattatcccagaatggaatattttcctcgtcaaaccagtgagaataagaggttatccaggtcagatttttatgtggctcgccttgtttcttatcttgcaaccagggcagcaaggaaacgccatccagcttaaggtcttttggaatgctgatatcggctgcatcaagagctgtcgggtagaaatccattgcggaaatcagcttgtcataattaccgggttgaagttttcctttccaccacataaacattggggtgtgagtaccgccaggataggtctgactcttatagcctttttgcgccccgttcagcggcagaggaccatcgataaccgcaccattatcggaggtaaagagaataattgtattgtcatactgtccgtttttcttcagttgttcgagaatgcgttttacaccctgatcaacagaataaacggaagcgtagtagttatctgctgtttgactaccggtattaaattgcttctgatattgatccggtgcaggattatcatttggcaggtgcggagcattataagccaggtaaagcataaaaggctggtcaagtgttttggcacgatcaacaacgccaattgcctcatcggttaactgatcgctgatataaccttttgcggggacacgttcacgatttttgaacagtgaaggggagttgtaatatgccgttcctgcagcgtggaatcccataaagtaatcaaagccacggttttgaggttgccattcttccgcagaaaatgtggtgaagttgtcatgatagtcacgcgtttgtttatcttccggtaccggcacattactgatttttgacaagtgccatttacctactgctgcagtgtaataaccatgattctggaataattcaggcaagaaagtttctgttagcggaataccatcctgagcatcggtattggaatagacaccaaagcgggcgggagctcgaccggtcattattgcggcgcgggaggggccggaaacaccgtgtgccacatagccgttagtaaaacgtacgccttcatccattaatgaaaggagcgtcggcgttgatttttgtgcagcttcaatggctttatctatccctattttgtaggtatcgacaacttcacgattttccattgtttttgggtcaaaagatcccttatcaaaaggaagttgtccataaccaagatcatccatggtcagtacgataatatttggctttcctttggtactgtattctgtcggcgtaaagtctgagaaagcaacgtttgttttggttgctttcagctttacatcatctgccgcatgagcagcaaatgcagccataccagatgccagtatcaaagatatcgaggtacttacgacacttttctttaatgcagacttcataaatgttcctcttcttattgtacttaattccaaagtaattttacgaagagaaataagtggatgtaagtgaagttagtcacataaagagatagcagatttagctaaaaaaagggaaaaacagtccataaagcgttgacattactttctgttctattaagtaatttctcgccgataaacaactaatttattgatatttaataaattattgcattttactgacaaaatgcagaattgagatcataaataatcatgcaacaggttatgcaagtgcataaatatgtgatggatgtcacttatttatttcaataaatatatcgcctaaaaacaacgcggggcagggaatggctgccccatttaattcttacgcagcgtgtgtggttgactactcgttagcaaataatcaaatagctaaagcattcatcgtgttgcccgtattcatacccgtgtgactttgacaacggtactccttagaaactctcttcggactgttgccgaaatgtttgcggaacgcataaataaaataagatgtactggcataaccacattgttcggcaattttattgactgaaccttctacgcgtatcaaattttttgcgtgctgcattcttgcatctaaaagaatctgtgagaatgtcgtttgctcttgcttaagttttttcttcaacaggctttcactgatgtacaggcagtcacaaatatctttcagcttccatgggtgcgccagcttcatgttgacaatatttctcactttcccagaaacggatagcacaccgttagttaatagtgtaatgaaacctttgcatgcggcaaaaatagacaggcaagaaaaaagcaaaagttctgaaaaattatgatgattgcgttcttccgagttgagataagcaatcatttcattaagcaatccagtcggtacatttgaagcacgtaaaaacttcgcaggaacaggcaccgtcactgtctggatgttagtgcattgtagatattttttaatggtattttcagtaaatccgatctctttaaaatgccgctcataaggttcaaaatgcgtacgaacagcgttatctaccatcaggatctcgccgtcagagaaggcgtaatctttatctaaaatgttagcgttgaaggcatgatgaataaatataacagaacaaacgagcgacattttatctccttaaaacaataaagtttttatcgatacttttttaacatttcatatttataatttgctgtttgttttcagccttgcaaactattgataatgaaatgtgtaagatctcttgcaatgcgacccatttctgaaatactcagctgatcaattgccgaaaaaatggctatcaacgtaagtgtcagtaataagacaaccacaattgcagacatgatttctttatagttgtctctttgcgtgattttgtttttcactgtggtcgcatgcatttcaaatatgtttatttagcggataacgttaaaaatcgttaatcagtatgcttaatataacaggctggagaaaagaggaaataggactggtgcttcagtactgagcggagtttcttacagctgtaggcagaagtttatatcttatagtatgtagtttaatttaatccatgtgagcaaattgcgaaataatagtcaatgaggaattcttctgctgtgcggatgacagcagaagaaatgagaagaggcattaatttgatggttctaattcaaccggaatacttttatagccaggaatgccacttaatggatcgtggttatcaagtgttagcatgtgattcgattctggaaaataggtcaccagtgagcggtcagccatagggtaaatgaccacttttaatctatccatgcggcgtgagctgcgcttaccgtctggcgtaagcgcaataagattaactctttcgccgttttttacacggcaaattttagcttgtttagcactcataaagaccacatctcgttgaccgaatacccctcgatagcgatcatccataccataaatcgtcgtgttgtactgatcgtggctgcgtactgtcgccatgaccagcttactgttaaacgctgaagagggatcttctaacagccctttgctggtaatgaaattagccttacctgacggcgtcatccagcgcctttcagcagctgcatttatcaggtgaaaaccaccgggatgacggatgcgctggttatagtcggcgaactctggcagcacagcttcaatgtcattgcgaatgcgatcataatcttccaccagatactcccaggctaccacgctctggggtagtgctgcctgcgcgattcccgcgaccactgcacactctgatttcagcattacaccggcgggttttaacacgccacgcgaggcatgaatcatcgacattgaatcctcaacggttaccgcctgcgcaccgtttttttgcatgtcaatctcgctacgtcccaggaccggcagaatatagctatgccgtgcggtcaacagatgagagcggttaagcttagtggctacgtgtaccgccaaatctaattgcgttaacggtacagcgctcgcttcccgatctggcattgccagcgcaaaattgccccccatgcagatcaatgctcgagcctgccccgtacatattgcttgcatgctggcaattgcagcatgtccaggtgcatgaggtggggtgaagccatagcgctcacccagacgagccagaaactctgcagacggtttctcggtgataccgacggttcggtcgccctgtacattagagtgtccacgtagtgggcagatacccgcaccaggcttgccaatgttacctttcatcaacagcagattgaccagttgctgtacgttctgggtaccatgttcgtgctgagtgatccccattccgtaacagataatggtgcgttcggcagcggcatatgcgtcagccagttcggcgatttgtgtctgacttagtccagaaatacgttcgatatctttccactcggaattgagaacgtcacggcgtagctcgtcaaagccgacggtatgcgtttgaataaactcgtcatcaagcaatgaaggccgacctgcggcgcttgcagcatcatcgcgctcaattaacaggcgcatcatccccttgagcaacgccatatcgccaccaatgcgcacgttatagtaggcactggccaactgagtctcagagttcgtcagcatttcaaacgggttttgcggtgcggtaaatcgctccaggccacgttcctgtagaggattgatggcgatcattttcgctccccgtttcactaaagcgcgcaacgaagtcagcatgcgagggtggtttgtaccagggttatgcccaatgcaaatgactaaatcgcacttctcaaagtcttccagcaacacggtccctttacctacaccgatactcgctgccaaacccacgcttgtcggttcatggcacatgttggagcagtcgggaaagttattgctcccgtattcacgggcaaaaagctgataaagaaaggcagcttcattggaagtgcggcccgaagtatagaattcaacctgattgggatcactatagctttgaaggcgtgcgccaatttcgtcgaaagcttgttgccagcttaatggcttgtaacagtcgctgacggcatcatatttcaaaggctgagtgagtcgccccgcagcctcaagctcgtggtctccccaggtaagtaatgattgaaccgtattctcagcaaagaaagaggcgtttacctgcttatccgtgacttcccaggcgattgcttttgcgccgttttcacaaatgtcgaatgacgcactgtgcttaggatctggccatgcacaacccggacagtcaaagccctctggcttattcatgtcaaacatggcaataacatcctggcgtatatccatctgcttacgtactgcattcgctacggatttaacagcaccccaaccacctgcagcaccctggtaggattcaatttttttcttcatctacttatcctgtgtggaaatgaattattaggatttgtaatagcgatgatgcacagtacatacaaagggattatcgccaacatggatatataagagtaggggactactctctttctatttttaatctattatcgttaaacaatagattaaatacgataagttaagcatcatctctcatagtgtttaaattaacatatttttcaatataaaaaataagactctggcttcaattgtgcgcggattttcttacaggtgtaggctaatagccttcacaaaataattatccgcgcaattttcgtgaatggagcgcatagactaaggtcaaaatcacaattattcatagataaaagtgacaccaatgactgactggacggttccggctgaaaccttgtttcctgtttgtccataggttgcgcttaaacccagaggtactttgcttttatttactgtccccagggagacattttctcccgtagccactatttttccattacgcattagagtgacacccactcccgatgcttttgttgcatcaggtgctgtgttagcaaacacttgtcggctactgtcagtggtggcacccgaaagataaaatgagagcttttgttcgcttgagcaatatacgccaaggggtatttctgcgcttccaggaaagtccgggagatccacggtgacattacgactatcaacggtgcagccgcctgttggcataacaacattgttatttgaaataatattccacgtaaaattacgcggatttccgcttcctaatgttgcaattttatacatatgaatacgggcaatgacttcccccgcttttatgacaactccaccggccgccccaactggggtaatatagagttttaacggtaatggcatcggtgtcttatcaccaatatccaatacgttggtatttgtcgtcaacgggaaggggtaggtcacattattccagtacagcgatcctttatatgactgtagggagcctgcgaaagctgagccttgtaccaggtttatatgatcagtgtcgtaccagccgccgtaatcattccagcaacttatatgctgagacaagtctacaaccagattctggcccggctgtattacagggtcgagattaacataaacagaggttgtacctgctccaatacttgacccgccatcgacattacaactgaaggcaaaaactttgcctgccattaatagaagataaataccgaacaggacctttatactgattgttttacccatgatatatcctaaggttaaaaattgatttaaaaagaaggctaagaaaatcgaatcgacgttattgccaggtgtagatcacattgattagcgcctcgatcgttccctggcttgcgtttccattcaccgtgatagctcttgccttaagtggaaactgtgcattacgagtgatctcatcaacaataaccgttttgctatcgccattttttaacgcagcatcctggtcatccctcagctctatctgaatattttcggcagtaccttcatttttgtaataacccgtattgtcagttgaacctgtcacgattgccgtcactgcacttgtttcaaccggacaatcggttaatgacaaagtaatattgtgccagccagatgcagaaccaggttgttgcagattgcgcgtataaagatccccgagattaacgttagcttctttggtttgaatagtgcagggtttagcgactacccgaccattaacagtgatagtgacatcggcggcctggagagttgctgtgaataacgcgcaaaacgtagctaacaggaacctcttgtgaagtcttttcatatctgactctgattattgaaattcaagggtaaaggttgccgaagccctcaccagtcccggattgacggacttctgagttgacttcagacgagcggagtaaggcaaaatattgttctgttctggtaccagtgggatccactgcatcccggcatgaagatcattcagtttcaccggacgcatatttgcgtccaatatttctatacccaaaccggaggccgtattgcttccttcatccagtttcaacaaagtattattttctgcatcctcaataccgttaaatgcaacccgaacccccgttgtccctttgctgcattcacttaacgtaatctgaaaagggacggctggacttgtgctaccggtcgttggaaattgtctggcactgtttttttggagatctacggtaaaattaagcgaatccgatgagactgtgcagccataatcgaggacgcgcccgctaattttaataacgctatctgcggataaagcagaataggtggttaaccccagacataaaccgaggaaaataatgttattgtatttcataatctattgttccttagcgacagattgctgtctgctggttcagtaaggtaccaggagaaacttcaggaagcttgtactcgacaatacagtttgagtttttatctttgccccatgaaacctgtaattgccctgactgtggaagtccagtcagataaacctgaccattttccgcgacaatgctgccatttttattctctccgtgtgtgacaattgcaccgaatggaacgctcttattaccgtacttcaacgtcattaatactttcccgccgatttgtgcattaaatgttgctctggcaatagcaccgtgagttgggatgacagtgaccacggtttcatccagttcaacattatctgcaagggaattcgcgttaagagcaacacggttttctctatattctgtcgcaaatggtaatatggcatagccacgccagtcggtatgaattccggtctggttctctattttgacattatcagcaccaggagccttaaccagaaccattgtgtcgcccagcggctgtccaaaggtgatgccatcagcatgagcaataatcccaccactcattccgtaataaatctggctgctgtcaccactccgactgtaaccgacattagtattaccataagctccacgataattaagagaactgtaaccactggtgccagacgatgtattacctccgtgggtgttaccgacctgaacgctataattcaggttattatccggcagcagagtgccataaacccccgatagattggtcatgccgcctttcaaatcgtttgacatactgtaactggcgtttgaattacgaaatgccgactgactgtctgtacgcatccaatgactgaagggaacattaagcgtaaaagcgagtaaatgatcccgatcgttttgccatatattattggaatagctgtaattcagcgaagtcgtaatatcaccaaacggcacatttaatccaaatgatatttgctggtcgctgcgtgacgtgttccagtaactttggcgactggcactgaaaaatgtcgtaccgtaatttccaagctgctgagagatgcttatttgttcctgaccacgcttactgtagaacagattaaaataatcaataaattgtgtctgctcattggtgtctccggtaggaggcttgacggtgtaaccactcattcgactgtaggcactgtcggataagttataaaaaccttgcgtagaatagcgatatcctgcgacctggatattggttccacaacaagtttattgctgcacttgttgaagagagtatttgcaaaaacattttatgtcgctaaataacatgacgatttcattatgcatgttatttataaaccgtgactaaacagaatattattgcgaacaagggaagtgtcaggaaaggtcaagagctaccaatggttaatatggctataaatcattagctatggttaatgtttgcttgctgaaactaacaccgaattgctctaaacagataagtgcagggtttattaaagctgtccgacagactttcttaacctggtaatatctctcttgggtgactctccaaacatccgcgaatattcccgactgaaatgggatagctttcgtaaccgacagcataggctgctgtggtgacatcgtaatgttcattcagcatctgtcgcctgacttcattgagacgtagccatttctgataccggagtggactcattcccgcttgatccgtccttaaataagtaacagcaccctctggtgttttcgtatgcagtgtctatgcgacagacactgcgctcttagcatggggcagggaataaccaggctatttctccatgcacaggccaattatgaaagaggagaggcttaagttcttgaaccctgaacgaataacgactaccagaaaagcacttcgcatcactcagacatgatttaacataatatacattatgcgcaccaatataaaccaaggaagaatccagtcgttggcggtcatgattgtcatgctcattaacaatgaccaaaccccatatctcacttactaccgtattctcggcttaaccgtccatgcaacctcaacacattgctttcaactgccgtcaccacgttctccggaaaatctgtcggtaatgaagtcttcacgttatccagtgctgctggaatcattctggcaaagtcactcaggatttcatgcatctgcacttccgggaatctcagcacctttgctgtcgccaaaaaatgtcgcggataaattttatcgattgccgtttttttgcctttggatgcgttaagccccattgccagtttgagatcgctgatgtgtattcccgtaccgccaaggaccggaaatgctgaaatgatgtcgtaaaatggcgtgagtcgataactgccgccagcctgaataaatacggagaagttttttgcatgaccgtccgttgcgccaatcaaccactggaagacctggaatttcataaaatcatagcgatctttcagcgcctcgctggaccccatcaaaaaagccatgatccgcgcgatgcctgggcctccatctgattcatatttcaccgatgaaggtaaaccgaatgtctgacacatatcctcctgtggcaagcgaagtaaaaccgttcgctcagcattccaacgcctgtcaaaacgttcgaccgctaacgcgcgcacatttcccgctttaatgatttctgcgtccggaacattcaacccaagttctttcgccagcagcagacagtaatactcattatcaacgctttggctgagatcgagcgtcgcattgggctgcctgatttcgccaatcggtaatttaatgatgtgcgtcgtcggcgttattcctttcggaatgcaccagtcattgcctattctgagcagtgctgtcttctcctgtgcgccagcaaccgagatgcgaaagtcattttcttctctaatcatgcctagcgggatatctgctttataagccgttaatacttcttcaagtctggcttcagtaagcttttcccatgccattatcggatgcgttacggtttcgtcttcgggtattaacgtcacggcaccaacgctgtctcgccctatttctgacaataaatcaaacggttgtctggatttggcatgataacgtttaacgatccggtcacgtacaatcgggctatcgggtaacaggttatcgaagaagttaaatacggcatcagaggtgatattccccctctgcaatggcagcgaaagtgacaacggtctggcataacggcttgctaaccactccggtgcatacttaaaggtgtgcgcgccgttggctaacttcgttaactcgcctacccgctggttgttcatccaagtgacaagtttaggcattaccactccagattttgctgttctgttgattctggcgaggcatttttcgcgtcgcatagcgtcattgagagttcaagcgactgtaaaatcttaaaaaatgtcgtgagcgtggtattgtcagggttgttttcgaaattggaaatcgtcgcctgcttaataccaatttttttcgccagctcgctctgcgtccagccattttgctggcgaaccagtttcattgcattcgccaattgcgttgggctatagatcttctgaaagctcatcatgtcatacgtccacagcaagtttatccgcttaaggggatattataagttttatcctttagtgaggataagtcaatctggaaacacatcttatccgctctacgggataaacgctgcgatatccgcgatcgcggataaaaaggaggatttaaataaggcgttgatgcgccgtttgaagtcggcaatattaagccgcatgccatctcgacatgcggcttatacggtttaccagctatatttcactcccagcatgccctgagtatcgctatagcctttatcacctagttgcacaccgacattcccccacaggctaaggttgttatttactttcgcctcaaccccggtacgtacttcaccgagattacgcgcaccttcacggcctacggtttgaccattcatcttcacggcgtagactttgctattgttgatccagttcgcttcaatgtaaggctggaactcacgctgtttaccatcgtcacgctggtgatggctgttcaggtaggttttcaccccaagtcgcgtttgcacatttccgtcgccttccgtttcaatgcgcgttccgtctttccgggtatggtcggaatctttcacacccatccaggtgatttgcgcctgtggctggacgtaccaggtattcagcgtcccttcgctgccgctaaatgttcccgcttcaaaggtatacccaccctcaacagaggccgtcacaccgcgagaatcatagtcgtcagcagaacggttatcggaactgacgctgttatcaaaccagttatacagcgcccagctgtcaacataagcgccggtcttattcgcatcgttctgataccaggtcgcgtacagcccagcgctgtaaccgctgatgcgcccatccgatttataacccacacgattactctgagtattactgtgctgattggcgtagcctgccatcacgccaagatgccagcgatcctgcgcgttgctactccactgcgccaaatcgccgcctagctgcaatacatagcggttagcctgagtatttagctgaccgtcaccggcccttgaacgttcgtgccctccgacatgacgcatccacatactgcttgccgacccctgagaatgcagtgaatctgtatactgcggctcacccagacggtcgtgtaaacgatggctaaacagcgagttggctgcggcaatgttgctgatatagcttccggcctccgggcgataaactgatgggccttccggatccacaacagggggattattgatgggatcgggtgtatccgctggcgttacgccgtcccatttactggtcagataccagtttttctcgtcattccccttccctttagccagcgtgtagacgtaagccccagcttcgacagttccggtggtcagcgcgaagttacctgcagaattaccgccaacctcaatgagttcaataccgttgaccgtttgtgcaccgacgccgccaatgttatcaacccgaacgcgagtgttcccttgggtatcgcctttcacgttcatcttatcggtgggcgaattatcgccgcccagcgtcgcgttgaacgtcatcaggccattgtttccggtatagttgccgttaacggtcagtacattccccggtttccccccttcgctattcatttgaaccgtgccgccattctccaggttgccgccgatagtggttttagcgacacgcagtgcccccccaggcataacgttcatatcacctgcagtggtgacatttcccgacatcacaccgctgttatggatattaatgtgttgacttgccatattaatggcagagtcggaaccgaaagcaatttccccccccacgatatccgtcgtaccctgatacgccgcggaatcgttgttaagagtcaggatcccggtacccagttttgtcacatcaccgctaccgctgatactgtgcgtcatcgcccagctacgctcagtggagatggtgagcaggccattattgataacggaagcatcacccaggtttttctgctcgttgacgctgagcgcgctgcctgtatcaatgttgaattgccccacaaagcggctattatcgccatccaactctacatctgtcctggcggttgcgctcacgatacccttcccgcttatgctattacgcagttcgccagtcacgttttttagcgttaacagaccgtcattggcaatatttcctctgcctaacccctgagtattatcgaggctgacttccgcatttgggctaatgctggttaacgcattgtagcgtgcattaagcccctcgatagccagcgttccccctgtaacattcaggtttccgccacctgtcagttcaccctgactgatcccacctttatttaccgtcagcgccccctctttgaacaaaacagtcgaacccatctgcccggtgaatgtctctaccgtctgcgtcgatccattaagatcgacgatggccgcgttgctgatgttcagttcccgggtgttgccaagtgcaccatccgcatcggtacgtaatgtccccatctgaacgtaggttgccccctgatagtcgttctgaccgttggaaagcgaaacctgtcgcaccgtattgattgccagatccccttcaccaccgatttttgccgacatatcggccgttgcgccataggctccgccatgttcggctaacgtcagcttttgcccaccatggatgttcagcgctttcagcccatagttaacgtacaaaccattacctggtgcggtcgtgaggcggaatccataatcaccctcggcgaccaccgttccgttttgcgcaatgtgtaacgttttgtccgcttccacctcgtcgccctgtaaatcacgtaacgttaatgagccacccgacccaataaccgtttgcgccttcaccagttgaacgccgacatggctatcgtcgtgttccagcaaattgagcgtcgtcagagggttattcgccatgggatcattccacggtttaggcacgtcgataagcacgtcgcccgtcccgtttacctgatagttacggcctttccaggtgtagtcacccgcgccgacaaccagcgtatcgacgctgatatatccctccgcgagcgtcgcagcaggaatatccgtatcgaaaatgatggtacctccattcatggccagtccaccaatggattgctctccaacttttaccgatgtggtattttcactgtcagactgcaacatcgcgtgagtaagcgcagcggtgttgtcgcgttccagagtgaaggtactgtctttcagttgggcaacaccggcgaattcagtccctgttgcatgggtaaagccaaacatcttgtcggaggatgacagctgcactcgcatcaagccatcgcctttgagcgcattggtcagcgtgtaatctcctgcactgttcgttgatgcgagaatgtcgagcgtaccggggtttgcaatggttacttcactcgaccccatgcccgttaccccatctgccgtatgagacgcaatggtcaggaggccgtcattgaccagcgttttaccgctataagtattccctgcattgaacaccgtatggcctgcatcatggatcacttttccgtctttatcgtcacctgtaatcagcatatcgacctggtagccggcatcactgttattggtatgattaaagacaaaaacgccttcgccaagaccaaactccactttcgtcgcattggtgataaatccggcatctgccgccgcctcaccgtgagcagcaccaatgtttagcgttcctacagcaggctcaaaaacacctaagtaaacttctccaccttcgacattcagcgtaccgttattcgtcagggttaacgtacccgtaccagatgtccctacgtacatattgaatgtttcaagaagagagttctgcccatccaccctcacgtcgcccttacttttgtcattgagagctatctgtgtatcacgcgctttaactatacctccggtggtaatattcagttcacccgtgcctaatacaccgacctgtagcaattgtgcgttagtagatgatgtctttaaattccagagactgtccgttgaaatattaactatccccttaccggaggcatttcctccgataaatccatagcccgttgaattaagggtggcaccattactgacatttacgataccgctaccaaaattaccgacattgatacccacagtatcgaacgatgatgtcgcatccatcaggttcagtgtgccgataccgcttgctttatcgcccaaaaaagtaatattttgcgatacgaacttaccgccatcgctaatattgaggtttccgacgcccgcaacaccaatggtggtatagacattcttattgacctcccacattccccctgtggtgatgctgacattcccgacgccggtttctccataaccgagtgaacttcctccgttgctgacaacaagcccctgattactgatattcatttcgccgtggccgtcataaccaagattagttccgagattagtgataacggagttcttatccttaacagtaatgttgcctgtgcctgtttctttcatccccgcagtgataattcccgaatctactttgccttcactcgagacattaagttcaccgtcgccagcatcaccgatatagatatagcggaaagcttcgcccgttccgaggaaattccaatgccctttatcggtcacgttgacgacaccgtgggaaccgtcctgaacgcccaccaatgaatattctttgttattaatcagtccattattggaaatattgactgtgccattaccgaaatatccattatagagtctgcgtaccgtgatgacagagtcttgatcctgcacattcagggttccgataccggtggcattgccaccgataatcgtattttcagccgtaaccaaccccccctcgcgaatagtcgcctccccagttccttgattaccaatttgaaattcaattgaggaatcattattttttattagccactcgccacccttttcaacgacaacctggccattactgcccgcctgatagcctaaaatggcgacgattgaactcgtgacgtaacccttatccgtaatatttaatgaacctgtgccatagctacctatttcgaataattcggtcgtcagaacagagtcctctccctcaacattgaccgtcccgacgcctcctgtcgaagaacctaatcttaaatagcctccatcgacgtgacccttctgtttaatattcagcgtccccgttccggattgacccacatttaaaggccttgcattatttccgctatcatacaatcgccaggtgccacccaaaacattaacggtgccctctgagtcctcattagcgccaatgacgctggtagtaatagtggttaaggaggcattaccgccagccaaaatattaagcactccagtgccataccagccaaccaggtaggcatcataagcaacatcagtatcaatattggtaatctgatcattatcaacttccagacttgcaccagacgctgaaccgcttagtgccagcaaaacacccagcgtcaatctactgaatttcgttgtcagtccagaggatttacgcaaattaaccgtcgatgttttacctgccctgcgagttaattccgagcaggcctgaaatacctgtagagtgcaattccatatcacgcgatagattctattcatataaacgctccatatacaaacaatacagccacgaaagagatgagtcgtcagacattaaaaatgaaacttattaaattgtcagaggtctgtattgagtgttagttggaggtgggaaggtgtcaatttggctaatttgctaatgctttcgaattgatagattaaaaattgcatagttcttattttatttaaatatgaactatgagttattgttgcttaataagaaaactgtttctttcaataggaaaattatcatcatcatatttaacaaagaatagcactaattgctaaaaatcgaagtttattaaaccccttttgcatccattagtgtctttaggaatattcgctataaaataagggttgtgcttaatgctttaagaaaaatagcaattttcccttgaatatagtactggtgatggaacgatgaatctgcaagctggcttttaacaagccagctctaaaagaagggaaataagaataactatactcaaaaactaacagccacggtcatcatgatgtggctgtcaatgaaactataacccaggcgctttccataacgacgtcgtcagtccatgatcaaccagccccagctgatcctgataaactgcctgccacttatcgcgtgaatcctgataaagttcatgcttttccgggtctggtgtgtgcgtccgttcccagcgaaccaggcgttctccggtttctgccattgatgaaaaaattccggcaccgacgccagctgcaatggcacatcctaatgcagtggcttctttgaccaccggaatattgacgggtaatcccgagacatcagcgagaatttgactccataatttcccttttgaacctccgcctgcaaagactaacgatgaaggatgaatattcgagaaatcagcaatttgctgcaagttacacgctgatacaatcgccgcattttcttccagcgcacggaacaatgtcgctttgttacatttatccgggtcaatggacaagttaataaaggaaggcgcagcgtgataccaggttttaaagcgcattctgtcggagaagatcggcattacgccccacgacccaggcggcacccgactggccatctcttccagcagcgtataggtgtcgatgcctaaacgttcggcaatcagtttttcttcggcacagaaagcatcgcggaaccagcgcatggtgagtccggtaaaaaagcttatagattcagcttgtaccatgccaggaataacatgaggattaacgcgcacgttcatttctgggtctgtcaccggcgcggctaaatttacaacttgctgccagaatgtgccgccaagaaccgcggtttgtgccggacgcacaacgcctaacccaaggcaaccaagctgcacgtcgcctcctccaacgaccaccggagtgcccgccttcagaccgcagagttccgccgcttgtgaacttaccacgcccagcaatgtgccggtttctttgacaggagaaagaatatcggcacgtaggccagccatatccagcaatgcaggtttccagtcacgggtggttagatcaagaagtcccgtggtgccagcgttagagggatccaccgccagttcgccgctgagcatataggccagccagtcgctgatcatggtgatggttgatgcctgacggtaaatatcggaacgatggtgcgccagccaaagtaatctggggatggcacttaaagccagtgtttgtccggtcgcgcgataaacttcgttttcaaaggtattgttgtgcagttctttaagttcgctaacttcgcgtgccgctctggcatccacattggcgcaggcccagatcggggctccttcattattatataaaacaatgccttcacgcatcgaacatgccgaaacggcagcgatatactccggggctatgccggcgttgtgcagcgcctggcgcatacactcacacgccagttgccagtttttgttgagatcaaattccatagaaccaggaacgtccggtactgccagatgccgccactccgcctgtcccactgctatttgattgccttccaggtcgaatatcacagcccgaatacttccggtgcctgcatccagcgccatcaggtagtactttgattctgaaagggtaaagagtcgagccattagattatcctcggcttatgcgttctgtctgttcctctatacgttctccatcattcccggtaataaggtcatgcaaatttaactacgtaaaatcgccgctgctgtgtcctgatcggtaaccagtgcgttgatataaccgcctttcattgcagcggcaattgcttcggctttattttctccccctgccacgccaacccggacgggtatggtcttcagcgcgcttaaaggtaagccaatcagttcgttatgtattttgatattcgtgacaacgtcaccttttgcatcaaaaaagtagcctaaaatgtcgccaaccgccccttttcggccaatcattaactgttcgccctggctgatataaccggagcgaatgattgtcgcatcgtcctgttgactcacagcaccaatgccgacaatcgccacatccgctgcttgcgcggctaacagaacatctttgacgcaattttcattttttagcgtacgggcaatgtcagcggaggatgcccgcaacggagccggaataatattcacactgcacgccgcgttaagctgcccgattcccgtcatataagaaccgacgccaccggagagcgtgaccaggcgaatttgctgtgacgaaataaaaccacttaagcgttgcagcgtattcatggttgcctcgccaaaaccaatcgccagcatctgttgtggttgaagtaaactcatcaacatatgcgccgcgcctatccccagtcgcccaccgacatcagcatccgcaagcccagggatcacccggacatgttgcagcgaaaactgacgacgtaattgagtttcatattccagacagccttcaaagcgagaattaatctgtacgcgaataatgccggactgatgccctttctccagcaatcgcgacactttcaaacgtgtcaggccgagacgatcgctgatctcgctctgggtcagcccgtcgtgatagtaaaaccacgcgatccgcgcgacctgttcttcttcacacattccctgttctgaaattgccgaatcgttgattgtcataattcattcttcactttgaacatatttaaatctttaatgcaattgttcagttcttgctcatttatatctgtgatggcaaccacagtttgactctacgagcatgaacaaacgcaaccgtgaaaatcaaaatagcataaattgtgatctattcgtcggaaatatgtgcaatgtccacctaaggttatgaacaaattaaaagcagaaatacatttgttcaaaactcacctgcaaaactgaacgggggaaatatgcaaacgagtgatacccgcgcgttaccgctactttgcgcccgctcggtttataaacagtattcaggggtcaatgtcctgaaaggcatcgattttacgttgcatcagggggaggtccacgccctgctcggcggcaatggtgccggtaaatcgacgttaatgaagattattgccggtattacccctgctgatagcggtacgctggagattgagggcaacaactacgtcagattaacgccagttcatgctcatcagctgggtatttatctcgttccccaggaaccgctgcttttcccaagcctgtcgataaaagaaaacatcctgtttgggctggcaaaaaaacagctctccatgcagaaaatgaagaacttgctggcggcgctgggctgccagtttgatctgcatagtctggcaggatcgctggatgtcgccgatcgccaaatggtggaaatcctccgcgggctgatgcgcgactcgcggattctgatcctcgatgaacctaccgcctcgcttacccctgcggaaaccgaacgcttgtttagtcgcttgcaagagctgcttgctactggcgtgggtattgtttttatctcgcataagctgccggaaattcgccagattgccgatcgaattagcgtgatgcgcgacggaaccatcgccttaagcggcaaaaccagcgaactgtctaccgacgacattattcaggccatcaccccagcggtacgggaaaaatcgctctctgccagccaaaaattatggctggagttacctggtaaccgcccacaacatgccgccggaacgccggtgctgacactggaaaatctgaccggcgaaggtttcaggaatgtcagcctgacgctcaatgccggagaaattctgggcctggctgggctggtgggggccggacgcacagaactggccgagacgctctatggtctgcgtactttgcgtggcggacgcattatgctgaatggtaaagagatcaataaattatccactggagaacgtttactgcgcggtctggtttatctgccggaagatcgccagtcatccggactgaatctcgatgcttcgctggcctggaacgtctgcgcccttactcataaccttcgtggattctgggcgaaaaccgcgaaagataatgccaccctggaacgttatcgtcgggcgctgaatattaaattcaaccaaccggaacaagctgcacggacattatccggtggcaaccagcaaaaaatcctcattgccaaatgcctggaagcttcgccgcaagtattgattgtcgatgagccgacgcgcggcgtggatgtctcggcccgtaatgatatctaccagctgttgcgcagcatcgccgcacaaaatgtggctgtgctgcttatctcctccgacctggaagagatcgaactgatggcagatcgtgtgtatgtgatgcatcagggcgaaattacccactctgcactgaccgagcgcgatattaatgtcgagactattatgcgcgttgccttcggcgatagtcagcgtcaggaggcgtcatgctgaagtttattcagaacaaccgtgaaatcacggcactgctggcggtggtgctgctgtttgtattacccggttttctcgaccgccagtatttaagtgtgcaaacgctgaccatggtttatagcagcgcgcaaatcctgatcctgctggcaatgggcgcgacgctggtaatgcttacgcgcaatattgatgtttcagtgggttcgattaccggaatgtgcgcggtgctgttggggatgttactgaacgcaggatattcactacctgttgcttgtgtcgcgactttactgcttggtttgctcgcgggatttttcaacggtgtcctggtcgcgtggctaaagatccctgccattgttgccacccttggcacgttagggttgtacagaggcatcatgttgctgtggactggcggcaaatggattgaagggttacccgccgaactgaaacagctctccgccccgctgctgcttggcgtttcagcaattggttggttgacgataattctggtggcatttatggcctggctgctggcaaagacggcgtttggacgcagtttttatgccacgggcaataatttacagggcgctcgtcaactgggcgttcgtactgaagccattcgcattgtggcattttcgttgaacggctgcatggcggcactggcgggaattgtgtttgcttcgcagattggttttatccccaaccagaccggtaccgggctggagatgaaagcaattgcagcctgcgtgctgggcggcattagtttgctcggtggttccggtgcgatcattggtgcggtactcggcgcatggttcctgacgcagatcgatagcgtactggtgctgttgcgcattccggcatggtggaatgattttatcgcgggtctggttctgctggcggtgctggtgtttgatggacgcctgcgttgtgcgctggaacgtaatctacggcggcaaaaatatgcccgctttatgacgccaccgccatccgttaaacccgcttcgtcaggtaaaaaacgggaggccgcataatgcgtattcgctacggttgggaactggctcttgccgcactgctcgttattgagattgtcgcatttggtgcaattaacccgcgaatgttagatctcaatatgttgctgttcagcaccagtgactttatctgcattggcattgtcgccctaccgctaacgatggtgattgtcagtggcgggatcgatatttcgtttggttcgaccatcggcctctgcgccattgcattgggcgtactgtttcaaagtggtgtgccgatgccgctggcgatactcctgaccttactgctcggcgcattgtgcgggctgatcaacgccggattaattatctataccaaagttaacccgctggtgattacgcttggcacgctgtatctgtttgccggaagcgctctgctgctttccggtatggccggagcgacggggtacgaaggtattggtggattcccgatggcgtttacagatttcgctaacctggatgtgctgggactccccgttccgctgattatcttcctgatatgtctcctcgttttctggctctggctgcataaaacccatgccggacgtaatgtgtttttgattgggcaaagcccgcgcgtggcgctttatagcgcgattccagttaaccgtaccttatgtgcgctctatgccatgacggggctggcgtctgcggtcgccgctgtgctgctggtatcgtattttggttcagcacgttccgatctcggtgcgtcgtttctgatgcccgccatcaccgccgtggtgcttggcggggccaatatttatggtggttccggttccattatcggcaccgccattgcggttttattagtgggatatttgcaacaaggtttgcaaatggcaggagtgccaaatcaggtgtccagcgccctttccggtgcgctacttatcgtcgttgtcgtaggtcgttccgttagcctgcatcgccagcaaattaaagagtggctggcgcgtcgggccaataacccattgccataaaggatatcttcatgacacttcatcgctttaagaaaatcgccttacttagcgctcttggcattgccgcaatctctatgaatgtgcaggccgcagagcgtattgcatttattcccaaactggttggcgtgggattttttaccagcggtggcaacggcgcacaacaagcgggtaaagagctgggcgttgatgtgacctacgacgggccgacagaacccagtgtttctggtcaggtacagttgattaataacttcgtcaatcaaggttataacgccattatcgtttctgcggtttcgcctgatggcttgtgtccggcactgaaacgcgccatgcaacgtggtgtgagagtgctgacctgggactctgatactaaaccggagtgccgctcttactacattaatcagggaacgcccgcccagttaggaggtatgttggtggatatggcggcgcgtcaggtgaataaagacaaagccaaagtcgcgtttttctactcaagccccaccgttacggaccaaaaccagtgggtgaaagaagcgaaagcgaaaatcgccaaagagcatccaggctgggaaattgtcactacgcagtttggctataacgatgccactaaatcgttacaaaccgcagaaggaatattaaaagcgtatagcgatctcgacgccattatcgcccccgatgccaacgccctgcccgctgccgcacaagccgcagaaaacttgaaaaatgacaaagtagcgattgtcggattcagtacgccaaatgtgatgcgcccgtatgtagagcgcggcacggtgaaagaatttggcctgtgggatgtggttcagcaaggcaaaatttcagtgtatgtcgcggatgcattattgaaaaaaggatcaatgaaaacgggcgacaagctggatatcaagggcgtaggtcaggttgaagtctcgccaaacagcgttcagggctatgactacgaagcggatggtaatggcatcgtactgttaccggagcgcgtgatattcaacaaagagaatatcggcaaatacgatttctgatgtgcattacttaaccggagtaagttatggcagatttagacgatattaaagatggtaaagattttcgtaccgatcaaccgcaaaaaaatatcccttttaccctgaaaggttgcggtgcgctggattggggaatgcagtcacgcttatcgcggatatttaatccgaaaacgggtaaaaccgtgatgctggcttttgaccatggttattttcagggaccgactaccggaattgaacgcattgatataaatatcgccccgctgtttgaacatgccgatgtattaatgtgtacgcgcggcattttgcgcagcgtagttccccctgcgaccaataggccggtggtactgcgggcgtcagatgcgaactctattctggcggaattaagtaatgaagccgtggcgttatcgatggatgacgccgtgcgcctgaacagttgcgcggtggcggcgcaggtttatatcggcagcgaatatgaacatcagtcgatcaaaaatattattcagctggttgatgccggaatgaaagtgggaatgccgaccatggccgtgactggcgtgggcaaagatatggtgcgcgatcagcgttatttctcgctcgcgactcgaatcgccgctgaaatgggggcgcaaattatcaaaacctattatgtcgaaaaaggttttgaacggattgttgccggatgtccggtacccattgttattgctggcggtaaaaaattaccggagcgcgaggcgctggaaatgtgctggcaggctatcgatcagggcgcttctggtgtggatatggggcgtaatattttccagtctgaccatccggtggcgatgatgaaagccgtacaggcggtggttcaccataacgaaacggctgatcgggcatatgaactctatctgagtgaaaaacagtaactgcggatctaaggagaagaattatgcacgtcacactggttgaaattaacgttcatgaagacaaggttgacgagtttatcgaagtttttcgccagaaccacctgggctctgtacaggaagaaggcaatttgcgcttcgatgtcttacaggacccggaagtgaattcgcgcttttatatctacgaagcctataaagatgaagacgcagtggcgttccataaaaccacgccccactacaaaacctgtgtcgcgaaactggaatctttaatgaccgggccgcgtaaaaaacgtctgttcaatggtttgatgccgtgaggcgaatttatcaattttatctacaattggggtaacgcgctgacgggagtaaaaaaatgtctgactggaacccctctttatatctacacttttccgctgaacgatcgcgtccggcggtggagttgcttgccagagtgccgctggaaaatgtcgaatatgttgccgatcttggctgtggcccaggtaacagcaccgcccttctacaacaacgttggcctgcggccaggataacaggcatcgactcgtctccggcgatgattgctgaagcgcgcagtgctttgccagactgccagttcgtggaagcagacatccgcaactggcaaccggtacaggcactcgatctgatttttgctaatgcctcactgcaatggctgcccgaccactacgaattgtttcctcatctggtttctttacttaatccgcagggcgtgctggcagtacagatgccagataactggctggagccgacccatgtgctcatgcgcgaagttgcctgggaacaaaactacccggatcgcgggcgtgagccgttggctggcgttcatgcttactacgatattttgagcgaagccggatgtgaggtcgatatctggcgaaccacctactatcaccagatgccgtcacaccaggcgattatcgattgggtgactgccactggattacgtccgtggttacaggatctgaccgagagcgaacagcagctttttcttaagcgctaccatcagatgctggaagagcagtatccactgcaagagaacggacagatactgctggcatttccgcgtctgtttattgttgcccggcgtatggagtaaatatcacgtcagctggtaatgacgatcgggaagaatttttgctggaatttcggcttcatcgttcatctgtaacaggtcaatttcaatagcgttgcagatggcatccagtggtaaatcattgttttcagtaccgaacggatcttccagttcttccgccagacaatccagcgaaataaaagtgtaggaaatcagcacagagataaaaggcgtcatgtaatgcaggtccacgaccagcgcgaacggcagcatgatacaaaacagataaacggtacgatgcaaaatcagggtgtaggcaaagggaattggcgtataggcaatgcgctcgcatcctgccaggaccgctgaaatatcattaagccgatcgttgaggctaataaacaggatatctgaaagctgtccattgcggcgctgaaccgccaaccattctcccattattaacaagatacggttagctggagagttcgaagccagtacacgctgaagatcttcagtcttgagataatgagccagcacttccgcctgtggctgtttgcgtaatgtcatgcgtaaacagtgggcgaaagcgatttgcagccgggcaaactcccttacacttgccgaatccggcaatgtcgtttttacctcgcgcagtaacgaccgtgaggcaatcatcaactgcccccaaagttttcgcgcttcaacgtaacgggcgtacccggcattattacgaaaaccaagaaaaatggcgatggcgacaccgagaatgctgaacggtgcgagggtgaatttgatgcccagatgcgtgtaccagggcagcatgaaaataacagcgatagaaaagagaaaattgagtagtaagcgcgaggatatcttggataatactgagccgtgccagacaaaaatacggcgcagccagtgttgttgtggacgaacaatcatggttatcttcaggcgtggaaaagtcgccctattaaacgtgattacgatcacattctcaagacgctacttacaaattacctacaagcttacaacattagcaggcgctgcatgtggcacctgttaatgataaaggcatataggatgttgtaactaatatggtgaaataagaaacccggtcgaaaccgggttcagaagtaacggtgttattagcacaacggacgtacagcttcgcgcatccctttttcgagaatcgcatccaggtcattagcaacctgctcgaccagaccaggcacttgcgtcaggtcctgctcccagtggtctttttctgccaaaacaatcgctaccagttcctgggtgccgataacacggtcacgatgctggctccagagttgctgataacgttccagccagtgtgcatcgtcctgtaccggatatgtttcgccgttacgctcaccacgatagaacgcaatcaatgccgctaatgcgaaagtaaggcgcgccggaagtgtgccgtttgccttctgccctgccagcagctgtggcaggatgcgggtgcggaacttggtcataccgttgagcgcgatagacagcagctgatgcttaatgtacgggttacggaaacgcccggtgactgcactggcgaaagattccagttcatcacgaggcaaatccagtaccggaataatttcttcgtagatagctttttcaacgaatgcgcaaatttcagcatcgttcatcgcttcacctacggtatccagccctgcctggaacgccaccggcaccagcgcggtgtgcgcaccgttgaggattgccactttgcgttctttgtacggtttaatatcgtcaacaatcagcacgttgagcggatatttgtccagacgcagttcagtcgctaaggatttcggtccctgaatcacaaacaggtaaaagtgttcagcggtgtcgagaaaaccatcgtgataacccagttcttcttccagtttagccacttcatcgcgcggataaccggtaacgatacggtccaccagcgtagaacagaagctgttagcctgatccagccattgaataaatgcttctggcagtgcccactcttgcgcatagcgcagcaccagttcacgcaacgcgtcgccattgtagtcaatcaactcacacggaatgatgatccaacctttatccagcgcaccgttgaaatggctaaagcgttcgaacagcagacgggtcagttttgccggatagcttaccgctggcgcgtcatcgaatttatcgcccgcatggtagctgatacccgcttcggtggtgttagagaaaacaaagcgcatttccgggttgtgcgccagtttcaggaattcatcgtattcactgtagacgctgatttcacgattaaccgagcgaatcagacgcgcgtcgctgaccgcttcccccttctcattcaggccacggataatggtggtgtacagaccatcctgcgtgctcagtgacggcgggaatgaagtttcaatcggacgaacaacgaccacgccagaattcagatcggtgtgctcattcaggagatcgatttgccagtcaacaaaggcgcgcaggaagttaccttcaccaaactgaatgatacgttctggatactgtgcaccgggaaaatcgcgacgatttagtgttttcacaatgggttcccttctgattagtcatacaacctgtttgaattggtacgacaggttagcaaactttaatacgccgaacccctgttttgatcaactcctgatgattaatgagcagttttatgagaaaagtgtggcgcggatcatggtttaatcgaggaaaaacgccttttcctggatcataaagtggtagaacacattgcattcaaatcgcgcgtaatgaataaagatgtcagacaacttcctcaccgtaacgcatagtgctggtacggttgcgcccatctttcttcgagcgatacagacacgtatcggcttcgaccatcaatttattaaagtcatcggtcagcgttaggtacgatgcgcgaccactaccgacgccaatacttaccgtgagataaagcgttttttgttgccaggtgaatggttgcagttcaacgcctttacggattttttccgccattagcagaccatcgacaggattcaccgacggcactgcaacagcaaattcttcgccgcccattcgcgccaccagccccttatcaccgacaatcttctgaatatgccgggcaaacacgcttaacactttatcgccacattcatgtccatagttatcgttaatgcttttgaaatagtcgatatcaagcagcatgacagtcagatgttgtgtctgtttcagcgatggacttttcagcgcctcataaagaccggaccgtgagtaaacctgagtcagaaaatcaaagtcggctcgcagcgcaacttgcttcattagcgaattgatcgctgccacgctaaaagaaaccataattgggcatatcgccatcgtggcaataccgagacgtgcggagaacatttgcggaatggagaacggcgaaccgaccgagatatcaatcaccgaatttgccaccagtacgatttccaccgcaccggtgacaaaggtcaacagacatgttacctgcggcgtatagcgcactgcacaccagattaatgcaggcagcgggaacgccagactccccgctccgccaatgactaccgaggcaataaccgacacaataagcgcgatggcgggcatcatctgttctgctttaaagcgcggcagcactccaggaatagccaacgtcagcatacaaggcacgatcaacacgcccgttgagaattgctcactgaaccagtccgcaagcaaaggccagaaatccagactatcaatactgaccgaaccaagatagcatgttcgctgacagcggcggcaaataaaggtaccctgggaatgctattttgtcgttttccgcaattctcatggctgattcatctgtacaactagccagtgatagattaccgccacgatataacgttgttgttcttcgcttaacgaaacaccctgcggaatgttatgccacttagccagacaaccgcgacagcaggtcgcggtggcgtgctgagcgataaacaccggatgcccgcgcatgggggtttgcttaccgtcattagccggtaatgccggagcaagacgtttagcgacaaaatccgccgcatgttgttcgatgactggcgcgcctttctccaggcaatactgacgctctttcatgcccagacgaaagcgagagcgaaattttgaacgggataaacgcgcgaagagtggatcgagagactgcattaataaaccgaacgccctaactgtttcgtcaattgttcaaggacggcaatacccgcaagcgagttacctgcatcatccagttccggactccagacagcgatggccatttcatgcggaacaatcgccacaataccgccaccaacgccagatttcgccggtagccccacccgccaggcaaactcccccgcgttctggtacataccactggtcgccatcagcgcgttaatttgccgcgcctgcattggcgtcaccactgcttcatcaatatgaatagctttcccctgattagccagaaagacaaacgtccgggccagctctacacagctcattttcagagcgcagtaatgaaagtagttttgcagaacggttgtcacgtcatgatggaaattgccaaacgacttcatcagccaggcgatagccgcatttcgcgcggaatgttcaaattcggaacgcgctaccaccgtatcgtaggaaatatcagacacaccgcttaagccgcgcacgacttccagcatacgttgccgtggtgcgcttaatcgcccttgcaacatatcgcagaccaccagcgcaccggcattaatgaacggattacgcggtataccctgctccatttccagttgcactaaggaattgaacggtgatccagacggatctttgccgacgcgttgccagatttcctcttcggagtaatgacgcatggcgacaacgagactcagcactttggaaatagactgaatggaaaaacgttcttgcgcgtctccggcctgaaaaagctgtccgtcaacggtacagatagcaatccccaatcgggaaccgtctactgtagccagcgccggaatataatccgcgactttaccctgaccaatgagcggccgcacttgccgcaagatgttttctaaaattgcattatccatggcgactgccactttctactcctggaccgcaggtctgaaaagacctgcgagtatatcagagctgaatatgtcgcgtcagatccggtctttccacaccgtctggatattacagaattcgtgtaagccgaaatgggaaagctcacgaccaaagccactctttttcacgccaccaaaggccactcgcgcgtcgctggcacaataaccattgataaacaccccaccgcattccagacgtgccgccatctgtctggcctgtgtttcgtcagtggtaaaaatggtcgctgaaaggccgaactcactatcattagccagttccagtgcatgttctgcatctttcgcaatggtgattgccgcaacggggccaaacatttcttcccgaaacgcggtcatttctggggtaacattcgccagaaccgttggcggatagtagttacctgccccagccatcttttccccgcccagtaacaaacgcgcaccctgcgccagggttttctccacctgatgatgcagctcatcacgtaaatcaaaacgagccattggtccgagagcgttctcttcgtcacggggatcgcccattttcaaggctgccgcagctgccacaaaacgttcggtaaatgccgaagcaattccctcttcgataataaagcgttttgccgctgcacatacctgtccggtattctgataacgtccggctaccgccgctttcaccgccagttccagatcggcatcgttaagcacaataaacggatccgaaccgcccagttccagtacgcattttttcagtgccgctccagcctgtgcgccaatagccgctcccgcacgaacacttccggtcaccgtgacagcagcaatgcgcgagtctttaatcatctgactgacaccgtcgttgtcggcattcagccagccatatacgccttgtgggatacccgcatctttaaacacctgggcaatgagctgtgcacagcccatcacattcggcgcatgtttaagtaagtagccgttacctgcaagaatgatgggaacagcgccacgcatcacctgccataacggaaaattccacggcataatcgccagaatcgtccccaacggtcgatactcaataaccgcctgctgattttccaccagcgtaggttccgccttcagcattgccggaccatgttctgcataccagtcacacaaattcgccgatttcgccacttcagcgcgcgcctggttgattggtttgcccatttcgcgggtgatcatttgcgccatttcttcgctacgagcgcgcagagccttaccgatatcacgcagtttttcagcacgataatctatatttgtctcgcgccagtcgcgaaagcctgctgccgccagctgaagtgcgttttcgatatcgtcagcgccagcccacggcagcacagaaagttgttcacccgtggcaggatttatggaaattgcatgagttgccggagtaatggtcatcggggtatctcctttatgagtcatggtatgaagatacgcagatttactcttgctttaaaatgaataatattaagccacttattcacgaatcgagaatgctatggatctgacccaactggagatgttcaacgcggttgccgaagctggcagcataacccaggctgcagcaaaagtgcatcgcgtgccgtcgaatctcactacccgtctgcgccagctggaaacagaactgggggttgatctgtttattcgcgagaatcagcgtttacgtctctctcctgccgggcataactttttacgctatagccaacaaattctcgcgttagtggatgaagcgcggagcgttgtcgctggcgatgagccgcaaggtttattttctcttggttcgctggaaagcaccgctgcagtgcgcattccagccacgctggcggaattcaaccgtcgttatcccaaaattcagttttcactttccaccggcccttccggcactatgctggatggtgtactggagggaaaactgaatgcggcgtttattgatggacccattaaccatactgccatcgacgggataccggtataccgcgaggaactgatgatcgtcacgccacaaggatatgcgccagtaacccgtgccagtcaggttaatggcagtaacatttatgccttccgcgccaattgttcgtatcgtcgccacttcgagagctggtttcatgctgacggtgccgctccgggaactatccatgagatggagtcttatcacggaatgttggcctgtgtgatcgcaggagcaggcattgcgcttattccgcgctctatgctggaaagtatgccggggcatcaccaggttgaagcgtggccgttagctgagcaatggcgttggttaacaacctggctggtctggcgtcgtggtgcgaaaacacgtccgctcgaggcatttattcaactgctggatgtgcctgactcggcaagacagggatatcaatgagctatttttgatagttcttgcggttaatatgctctatatagtgatgttccgatgacttatgactatatggggcaaatatggttacgccagtaagcatcagcaattacatatctcttcctgatgattttcccgtacgtaatattgcaccgcaggtaaaagaagttttaaaggattttattgatgcacttagtacaataatatgtaatgaagagtggcgcacgtctttaaacatcaactcagccacaaaaaagatatttaataaccttgacaacttatcatatattcagaggacttcttttcggggtaacgacacgctatacaatgaaaaggttcagtttaaactcacttatcccgccaggaatggaagacacaaagaaaatattgaatttcaggtagtaataaatttaagccctatttatttagataattttcgccatgatggagaaattaatattttttgcgctcccaacccaaagcctgtcactatggggcgcgtatttcagaccggcgtcgagcgtgtactctttctgtttctgaatgattttattgaacaatttccaatgatcaaccctggtgttcccatcaaaagagcgcatacaccacatattgaacccctgccttcggatcaccataccgctgcagattacttacgccagtttgatttgcttgtcctgaattttatctctcgcggtaattttgtcatactcccccgattatggaataactctgaggttcacagatggttcgtcaataaagatcctaacttgatcaccgccattctcgacataacggacagcgaattaaaagaggatttgttgcaaagcctgatggattcattaggttctaacaaacatgtactacccgaagtctgcatctgctttttatcccttttagcagaacaagaatctcctcattttcagaacttgtttttatttttcgccaatatgttattgcactatcaccaatttatgaatcccaatgaaagtgatttgaatgacgtgttgatgccagcatcattaagtgatgataaaattatcaaacatatggcgcgcaggaccctcaaactgtttgtaaaaaatgaaacaccgccaaaagttactcacgaagacctggtgaaaaacaggcctcgctcccctgtcagaccacctatacccgcaaccgccaaaacgccagacctccctgaacgtcattaaaccgtgatgttaccgactctctgacgcgtgaaagaatcagcgtcagagaaacggaaaacgcgatccagatcacaaatgcattgtattcacatcattaaccgttttaagatcatttcatcactttttcgcaactcacccgataatctgttatgacaacaaacactgtttcccgcaaagtggcgtggctacgggtcgttacgctggcagtcgccgccttcatcttcaacaccaccgaatttgtccctgttggcctgctctctgacattgcgcaaagttttcacatgcaaaccgctcaggtcggcatcatgttgaccatttacgcatgggtagtagcgctaatgtcattgccttttatgttaatgaccagtcaggttgaacggcgcaaattactgatctgcctgtttgtggtgtttattgccagccacgtactgtcgtttttgtcgtggagctttaccgttctggtgatcagtcgcattggtgtggcttttgcacatgcgattttctggtcgattacggcgtctctggcgatccgtatggctccggccgggaagcgagcacaggcattgagtttaattgccaccggtacagcactggcgatggtcttaggtttacctctcgggcgcattgtgggccagtatttcggttggcgaatgaccttcttcgcgattggtattggggcgcttatcacccttttgtgcctgattaagttacttcccttactgcccagtgagcattccggttcactgaaaagcctcccgctattgttccgccgcccggcattgatgagcatttatttgttaactgtggtggttgtcaccgcccattacacggcatacagctatatcgagccttttgtacaaaacattgcgggattcagcgccaactttgccacggcattactgttattactcggtggtgcgggcattattggcagcgtgattttcggtaaactgggtaatcagtatgcgtctgcgttggtgagtacggcgattgcgctgttgctggtgtgcctggcattgctgttacctgcggcgaacagtgaaatacacctcggggtgctgagtattttctgggggatcgcgatgatgatcatcgggcttggtatgcaggttaaagtgctggcgctggcaccagatgctaccgacgtcgcgatggcgctattctccggcatatttaatattggaatcggggcgggtgcgttggtaggtaatcaggtgagtttgcactggtcaatgtcgatgattggttatgtgggcgcggtgcctgcttttgccgcgttaatttggtcaatcattatatttcgccgctggccagtgacactcgaagaacagacgcaatagttgaaaggcccattcgggccttttttaatggtacgttttaatgatttccaggatgccgttaataataaactgcacacccatacataccagcaggaatcccatcagacgggagatcgcttcaatgccacccttgcccaccagccgcataattgcgccggagctgcgtaggcttccccacaaaataaccgccaccaggaaaaagatcagcggcggcgcaaccatcagtacccaatcagcgaaggttgaactctgacgcactgtggacgccgagctaataatcatcgctatggttcccggaccggcagtacttggcattgccagcggcacaaaggcaatattggcactgggttcatcttccagctcttccgacttgcttttcgcctccggtgaatcaatcgctttctgttgcggaaagagcatccgaaaaccgataaacgcgacgattaagccgcctgcaattcgcagaccgggaatcgaaatgccaaatgtatccatcaccagttgcccggcgtaatacgccaccatcatgatggcaaatacgtacaccgaggccatcaacgactgacgattacgttcggcactgttcatgttgcctgccaggccaagaaataacgcgacagttgttaatgggttagctaacggcagcaacaccaccagccccaggccaattgctttaaacaaatctaacattggtggttgttatcctgtgtatctgggttatcagcgaaaagtataaggggtaaacaaggataaagtgtcactctttagctagccttgcatcgcattgaacaaaacttgaaccgatttagcaaaacgtggcatcggtcaattcattcatttgacttatacttgcctgggcaatattatcccctgcaactaattacttgccagggcaactaatgtgaaaagtaccagcgatctgttcaatgaaattattccattgggtcgcttaatccatatggttaatcagaagaaagatcgcctgcttaacgagtatctgtctccgctggatattaccgcggcacagtttaaggtgctctgctctatccgctgcgcggcgtgtattactccggttgaactgaaaaaggtattgtcggtcgacctgggagcactgacccgtatgctggatcgcctggtctgtaaaggctgggtggaaaggttgccgaacccgaatgacaagcgcggcgtactggtaaaacttaccaccggcggcgcggcaatatgtgaacaatgccatcaattagttggccaggacctgcaccaagaattaacaaaaaacctgacggcggacgaagtggcagcacttgagtatttgcttaagaaagtcctgccgtaaacaaaaaagaggtatgacgatgtccagacgcaatactgacgctattaccattcatagcattttggactggatcgaggacaacctggaatcgccactgtcactggagaaagtgtcagagcgttcgggttactccaaatggcacctgcaacggatgtttaaaaaagaaaccggtcattcattaggccaatacatccgcagccgtaagatgacggaaatcgcgcaaaagctgaaggaaagtaacgagccgatactctatctggcagaacgatatggcttcgagtcgcaacaaactctgacccgaaccttcaaaaattactttgatgttccgccgcataaataccggatgaccaatatgcagggcgaatcgcgctttttacatccattaaatcattacaacagctagttgaaaacgtgacaacgtcactgaggcaatcatgaaaccactttcatccgcaatagcagctgcgcttattctcttttccgcgcagggcgttgcggaacaaaccacgcagccagttgttacttcttgtgccaatgtcgtggttgttcccccatcgcaggaacacccaccgtttgatttaaatcacatgggtactggcagtgataagtcggatgcgctcggcgtgccctattataatcaacacgctatgtagtttgttctggccccgacatctcggggcttattaacttcccacctttaccgctttacgccaccgcaagccaaatacattgatatacagcccggtcataatgagcaccgcacctaaaaattgcagacccgttaagcgttcatccaacaatagtgccgcacttgccagtcctactacgggcaccagtaacgataacggtgcaacccgccaggtttcatagcgtcccagtaacgtcccccagatcccataaccaacaattgtcgccacaaacgccagatacatcagagacaagatggtggtcatatcgatagtaaccagactgtgaatcatggttgcggaaccatcgagaatcagcgaggcaacaaagaagggaatgattgggattaaagcgctccagattaccagcgacatcaccgccggacgcgttgagtgcgacatgatctttttattgaagatgttgccacacgcccaactaaatgctgccgccagggtcaacataaagccgagcatcgccacatgctgaccgttcagactatcttcgattaacaccagtacgccaaaaatcgctaaggcgatccccgccaattgtttgccatgcagtcgctccccgaaagtaaacgcgccaagcatgatagtaaaaaacgcctgtgcctgtaacaccagcgaagccagtccagcaggcataccgaagttaatggcacaaaaaagaaaagcaaactgcgcaaaactgatggttaatccataccccagcagcaaattcagtggtactttcggtcgtgcgacaaaaaagatagccggaaaagcgaccagcataaagcgcaaaccggccagcatcagcggtggcatgttatgaagccccactttgatgaccacaaaatttagcccccatacgaccactaccagtagcgccaacaccccatcttttcgcgacattctaccgcctctgaatttcatcttttgtaagcaatcaacttagctgaatttacttttctttaacagttgattcgttagtcgccggttacgacggcattaatgcgcaaataagtcgctatacttcggatttttgccatgctatttctttacatctctaaaacaaaacataacgaaacgcactgccggacagacaaatgaacttatccctacgacgctctaccagcgcccttcttgcctcgtcgttgttattaaccatcggacgcggcgctacgctgccatttatgaccatttacttgagtcgccagtacagcctgagtgtcgatctaatcggttatgcgatgacaattgcgctcactattggcgtcgtttttagcctcggttttggtatcctggcggataagttcgacaagaaacgctatatgttactggcaattaccgccttcgccagcggttttattgccattcctttagtgaataacgtgacgctggttgtgctcttttttgccctcattaactgcgcctattctgtttttgctaccgtgctgaaagcctggtttgccgacaatctttcgtccaccagcaaaacgaaaatcttctcaatcaactacaccatgctaaacattggctggaccatcggtccgccgctcggcacgctgttggtgatgcagagcatcaatctgcccttctggctggcagctatctgttccgcgtttcccatgcttttcattcaaatttgggtaaagcgcagcgagaaaatcatcgccacggaaacaggcagtgtctggtcgccgaaagttttattacaagataaagcactgttgtggtttacctgctctggttttctggcttcttttgtaagcggcgcatttgcttcatgcatttcacaatatgtgatggtgattgctgatggggattttgccgaaaaggtggtcgcggttgttcttccggtgaatgctgccatggtggttacgttgcaatattccgtgggccgccgacttaacccggctaacatccgcgcgctgatgacagcaggcaccctctgtttcgtcatcggtctggtcggttttattttttccggcaacagcctgctattgtggggtatgtcagctgcggtatttactgtcggtgaaatcatttatgcgccgggcgagtatatgttgattgaccatattgcgccgccagaaatgaaagccagctatttttccgcccagtctttaggctggcttggtgccgcgattaacccattagtgagtggcgtagtgctaaccagcctgccgccttcctcgctgtttgtcatcttagcgttggtgatcattgctgcgtgggtgctgatgttaaaagggattcgagcaagaccgtgggggcagcccgcgctttgttgatttaagtcgaacacaataaagatttaattcagccttcgtttaggttacctctgctaatatctttctcattgagatgaaaattaaggtaagcgaggaaacacaccacaccataaacggaggcaaataatgctgggtaatatgaatgtttttatggccgtactgggaataattttattttctggttttctggccgcgtatttcagccacaaatgggatgactaatgaacggagataatccctcacctaaccggccccttgttacagttgtgtacaaggggcctgatttttatgacggcgaaaaaaaaccgccagtaaaccggcggtgaatgcttgcatggatagatttgtgttttgcttttacgctaacaggcattttcctgcactgataacgaatcgttgacacagtagcatcagttttctcaatgaatgttaaacggagcttaaactcggttaatcacattttgttcgtcaataaacatgcagcgatttcttccggtttgcttaccctcatacattgcccggtccgctcttccaatgaccacatccagaggctcttcaggaaatgcgcgactcacacctgctgtcacggtaatgttgatatgcccttcagaatgtgtgatggcatggttatcgactaactggcaaattctgacacctgcacgacatgcttcttcatcattagccgctttgacaataatgataaattcttcgcccccgtagcgataaaccgtttcgtaatcacgcgtccaactggctaagtaagttgccagggtgcgtaatactacatcgccgattaaatgcccgtaggtatcattaaccaatttaaatcggtcaatatccaacaacattaaataaagattcagaggctcagcgttgcgtaactgatgatcaaaggattcatcaagaacccgacgacccggcaatcccgtcaaaacatccatattgctacggatcgtcagcaaataaattttgtaatcggttaatgccgcagtaaaagaaagcaacccctcctgaaaggcgtcgaaatgcgcgtcctgccagtgattttcaacaatagccagcattaattcccgaccacagttatgcatatgttgatgggcagaatccattagccgaacgtaaggtaattcatcgttatcgagtggccccagatgatcaatccaccgaccaaactggcacagtccataagaatggttatccgttatttctggcttactggcatctctcgcgaccacgctgtgaaacatactcaccagccactggtagtgggcatcgatagccttattgagatttaacaagatggcatcaatttccgttgtcttcttgatcattgccactcctttttcacagttccttgtgcgcgctattctaacgagagaaaagcaaaattacgtcaatattttcatagaaatccgaagttatgagtcatctctgagataacattgtgatttaaaacaaaatcagcggataaaaaagtgtttaattctgtaaattacctctgcattatcgtaaataaaaggatgacaaatagcataacccaataccctaatggcccagtagttcaggccatcaggctaatttatttttatttctgcaaatgagtgacccgaacgacggccggcgcgcttttcttatccagactgccactaatgttgatcatctggtccggctgaacttctcgtccatcaaagacggccgcaggaataacgacattaatttcaccgctcttatcgcgaaaaacgtaacggtcctctcctttgtgagaaatcaaattaccgcgtagtgaaaccgaagcgccatcgtgcatggtttttgcgaaatcaacggtcattttttttgcatcatcggttccgcgatagccatcttctattgcatgaggcggcggtggcgctgcatcctgttttaaaccgccctggtcatctgccaacgcataaggcatgacaagaaaacttgctaatacaatggcctgaaatttcatactaactccttaattgcgtttggtttgacttattaagtctggttgctatttttataattgccaaataagaatattgccaattgttataaggcatttaaaatcagccaactagctgtcaaatatacagagaatttaactcactaaagttaagaagattgaaaagtcttaaacatattttcagaataatcggatttatatgtttgaaaattattatattggacgagcatacagaaaaagcaaatcacctttacatataaaagcgtggacaaaaaacagtgaacattaatagagataaaattgtacaacttgtagataccgatactattgaaaacctgacatccgcgttgagtcaaagacttatcgcggatcaattacgcttaactaccgccgaatcatgcaccggcggtaagttggctagcgccctgtgtgcagctgaagatacacccaaattttacggtgcaggctttgttactttcaccgatcaggcaaagatgaaaatcctcagcgtaagccagcaatctcttgaacgatattctgcggtgagtgagaaagtggcagcagaaatggcaaccggtgccatagagcgtgcggatgctgatgtcagtattgccattaccggctacggcggaccggagggcggtgaagatggtacgccagcgggtaccgtctggtttgcgtggcatattaaaggccagaactacactgcggttatgcattttgctggcgactgcgaaacggtattagctttagcggtgaggtttgccctcgcccagctgctgcaattactgctataaccaggctggcctggcgatatctcaggccagccattggtggtgtttatatgttcaagccacgatgttgcagcatcggcataatcttaggtgccttaccgcgccattgtcgatacaggcgttccagatcttcgctgttacctctggaaaggatcgcctcgcgaaaacgcagcccattttcacgcgttaatccgccctgctcaacaaaccactgataaccatcatcggccaacatttgcgtccacagataagcgtaataacctgcagcatatccgccaccaaaaatatgggcgaaataactgctgcgatagcgtggcggtatagcaggaagatccatattttccgccaccagcgcccgcaattcaaaatcatcgacatcctgcattgcttcgttttcttccaggcaatgccagcgcatatcgagaagtgcggcgctaagcagttcgctcatctcataccctttgttgaacaggctggcattacgcattttctgttgcagttcgtcaggcattgctgccccgctctgataatgccgggcgtagcgagcgaatacctgcggatgcgttgcccagtgttcgttgatttgcgacggaaattcgacaaaatcacgcggcgtgttggtgccggaaagcgtggcataacgctggcgggcaaaaaggccgtgcagcgtatgaccaaattcatggaataaggttatgacatcatcccagagtaacaacgcaggctcaccggcagcgggtttctgataattgcagacgttataaattaccggatgtgttttattaagcgttgattgctcaacaaaattgcccatccatgcaccgccgctttttgaatcacgggcgaagaaatcaccgtaaaataacgccagccccacgccattatgatcaaaaatttcccacacacgaacgtcaggatggtagacaggaatatcaaaacgttcgacaaacttaataccgaagagctgattcgcggtccagaatacaccttcatttaacaccgtgtttaattcaaaatatggcttgagctgcgcctcatcaagatcaaatttctcccgccgtacctgttccgcataaaatgcccagtcccacggctgcgcgctaaacccgccctgctgcttatcgataaccgcctgtatggaggctaattcatcgctcgcacgttgacgcgccgctggaacaatttcccgcataaagttaagtgctgcttcaggtgtttttgccatctgatcggcgattttccatgcggcataatgaggaaaaccaagtagtgttgcctgttgtgcacggatctccaccagacgttgaatgatagcgcgggtatcattggcatcatttttttccgctcgcgtccagcccgcaataaacagtttttcacgcgtcgcacgatcgcgcatttcggcaagcgccggttgttgggtggtattcagcagcggaatcagccatttgttatccagacctttctcgcgagccgcctctgccgccagcgcaatctcttgctcactcattcctgccagctgcgcgatatcgttcacaaccagaccgccggatttatttgctgccagtaatcgctggttaaactggctggtcagggtcgcagcttctgtattcagtacttttaattttgctttatcagcttgcgcaagtttggctccggcaaggacaaaacgttgatgaatcacctccaccaggcggatggattcactatcaagccccagggattcacggcgctgccagacagcatctacccgcgcgaataattcaccgttcagatagatatcattagccagttccgccagttcagcggaaaactgctcgtcaagacgctgtaattcatcattggtatgcgccgcagtcatcgcaaaaaagacgctggtaacgcgggtaagtaattctccgctttgttccagtgccagaatagtattgttgaaatcaggcatttgcgggttaagcgcgatggcagcaatttctgcccgcttttgctgcattccctcatcgaatgccgggcgatagtgatgattggcaatttgatcaaaatggggagccagatacggcagtgtgctttgcacaaggaaaggattcattgttgtcattttcttctcctgaacgcgaggtgttccatagcgtaggcttactgataacggagtgcaatcttgcaatccagtattacccgctcttaagcatcccgtgctatgttattgacacacaaaagcgttgaggaacagtgagatgatcgttttagtaactggagcaacggcaggttttggtgaatgcattactcgtcgttttattcaacaagggcataaagttatcgccactggccgtcgccaggaacggttgcaggagttaaaagacgaactgggagataatctgtatatcgcccaactggacgttcgcaaccgcgccgctattgaagagatgctggcatcgcttcctgccgagtggtgcaatattgatatcctggtaaataatgccggcctggcgttgggcatggagcctgcgcataaagccagcgttgaagactgggaaacgatgattgataccaacaacaaaggcctggtatatatgacgcgcgccgtcttaccgggtatggttgaacgtaatcatggtcatattattaacattggctcaacggcaggtagctggccgtatgccggtggtaacgtttacggtgcgacgaaagcgtttgttcgtcagtttagcctgaatctgcgtacggatctgcatggtacggcggtgcgcgtcaccgacatcgaaccgggtctggtgggtggtaccgagttttccaatgtccgctttaaaggcgatgacggtaaagcagaaaaaacctatcaaaataccgttgcattgacgccagaagatgtcagcgaagccgtctggtgggtgtcaacgctgcctgctcacgtcaatatcaataccctggaaatgatgccggttacccaaagctatgccggactgaatgtccaccgtcagtaatttttatacccggcgtaactgccgggttattgcttgtcacaaaaaagtggtagactcatgcagttaactcactcacaagcaagaacgaatgaccgtcgaaacgcaacttaatcccacacagcctgtcaatcagcagatttatcgtattcttcgtcgcgacattgtccattgcctgattgctccaggcacaccgttgtcggaaaaagaagtttctgttcgtttcaatgtgtcacgccagccggttcgtgaagcctttattaaactggcggaaaacggcctgattcaaattcgtccgcaacgtggcagctacgtcaacaaaatttccatggcccaggtgcgcaacggcagttttatccgtcaggccattgagtgcgcggtggcgcgtcgggcggcgagcatgattaccgaaagccagtgctatcaactggaacaaaatcttcaccagcaacgcattgccattgagcgcaagcaactggatgatttttttgaacttgatgacaacttccatcaactcctgacgcagattgccgactgtcaactggcgtgggataccattgagaacctgaaagcgaccgttgatcgcgtgcgctatatgagtttcgaccacgtttctccaccagaaatgctgttacgccagcatcttgatattttctctgccctgcaaaaacgtgatggcgatgcggtagaacgtgcaatgacgcaacatttgcaggaaatcagcgaatccgtgcgccagatccgccaggaaaacagcgactggtttagcgaagagtaattcatttcctctcatcccatccggggtgagagtcttttcccccgccttatggctcatgcatgcatcaaaaaagatgtgagcttgatcaaaaacaaaaaatatttcactcgacaggagtatttatattgcgcccgttacgtgggcttcgactgtaaatcagaaaggagaaaacacctatgacgacctacgatcgtaaccgtaacgcaatcaccactggcagccgtgttatggttagcggcaccggtcacactggcaagatcctgtcgattgatactgaaggtctgaccgctgagcaaatccgccgcggaaaaaccgtagttgttgaaggttgtgaagagaaactggcaccactggacctgattcgtctcggcatgaactaagcgtgtgaatgccgccgatggcggcattgcttttttacttcacggaatattttgccacggtcgctttcgcgccatgcgctaataaagacaagtacgtttccgtcactcttgcagtaaacaaactattgtctggcaaatcatcaccaaagatcgccttaatcgccagcaatgactggacgcgcgctttcccttcggcactactttgtacagccttctgaataacaggtaacagtgggtcactgatttctatcggatttccctgttcatcaacaccaccgacataacgcatccaacccgcgacgcccagcgccagcagatcgaacttgctgtcatgcgccagatgccagcgaacagaatccaacatccgctgtggcaatttctggctaccatccatcgcaatctgccaggttcgatgacgtaacgccgggttgctatagcgtgcaattaatcggttagcgtaatcttgcaaatcaacgccctgcactttcaacgtcggcgcttgttcctgcaacatcaagccatacgccgcataacgataatgttcatcttccatacagtcattaatgtgctgatatcctgcaagataccccagatacgccaggaatgaatgactgccgttgagcatgcgcaacttcatctcttcataaggcagcacatcgctaaccagttcggctcccgctttttcccattccggacgtccggcaacaaagttatcttctattacccactggcggaaaggttcacaggcaacgcccgcaggatcgcgcacaccggtaagttgttcgattttcgccagcgtatcctctgtcactgcgggcacaatacggtccaccattgttgatgggaaagtcacgttatcttcgatccattgtgccagttttacatcaacggcttgtgcgtaggaagtgacaacgtcacgcataacatgaccgttttctggcatgttgtcacatgacatgacggtaaatgcgggaagtcctgccgctttacggcgagccagcgcctcaacaatcacccctgttgctgttttcggctggtggggattttgcacgtcggcagctaccatcgggtgatcgagcattaactgtccggtcgccggagagtggaaataccctttttcggtgattgtcagagagacaatcgcgatttgcggttcacacatcgctgccaacacggtttctaagccatctatctgtacgtgcaaggcttttttaacgacgccaacgacgcgagccgtccacacatcggccgacatttccgcaacggtataaagattatcttgctgttgtaaatcggcaatttgctgttcgccgccgattaagttgacctcataatatccccagtcactgaaatgttccgtagcaagaatatcggcatacacaccctgatgcgcacggtgaaatgcaccaaagcctaaatgaacaattcttggagccaggttattacgatcataaacagggagtgtcgcttttgctgataacaaattatttcccataacaattccttaaatataaatatggcaagctatatgttttgttatatgaataaaaatcccctctccggtaagagaagggattaagggtttacagacttctggaaggttgcgcagctcttacaacacgcggttgatcttccgcagcgtcttccagcgcacttaaatcacggtctttcacctctggcattttcagcgcagagattaaaccaatcactgaatatgccatgatcataatggcgatcggataccaggattccgtcatggtgcagaaaatacccgccaggataggaccaaaaccggaagcgataagaccaccaatttctttagaaatagccatccgggtaaagcggtttttacagccgaacatttctgccatggtaatgttttccagagcaaataatcccagcaccgcacagttatgaatcacaatcagtgcaaccataatggtgctcggggcatagcttttatctacaatgatagaaagcattggccatgccagcacaatcgcggaggtattcataataatatacgggatccggcgaccaattttatcggataaccaaccaaggaacggaatggtcataaagccgagaatcgaactgatcatcaatgcatctgttggaattgctttgttaaacaataacgtctgcactaaatagcctgcaaggaaagtctgaattaacccggagttacccgcctgaccaaaacgcagccctgttgccagccagaaggatttgctctggaacatgctaccagcaggtgcaggttttgctgtcggttggttactgtcgttaaccttctcaaagaccgggctttctttcagattcatacgcaaccagatagcaaagaccatcacgacaacactcgccaggaacggtatacgccatccccacgccagcagttcctctttactgagaatgaagaacataaaggcccagattgccgttgcgctcaaggttccgcagttagttcccatagccacaaatgaggagataattccgcgcttaccttttggcgcatattccgccagcatcgtaccggcaccggaaatttccgcacctgcacccaacccctgaataatacgcaacgtcaccagcaagatgggtgcaaaaacaccaatctgtgcataggtcggtaacacaccaattaaggtggtacagatccccatcatggtgatggtaataaagagcacttttttacgccctattctgtcgcccattttgccgaaaataaatgctccgacaatacgcgccacataacctgcaccgtaggttcccattgccagaattaacgccattgccgttgatgattcaggaaaaaatatttcatgaaacactaacgctgcgccgagcgaatataactggaaatccataaattcaagcgcagtgcccagccatcccgatactgctgctttcaccaaatccttagtgcttctttcgtgtttttctattgtcataatggttatctctaaaaaagaggtaagatgcgtactacttactcgccgttattggtattattcagaaaaagtgagtaagactttgcagcaatgtttttgatcctgttcaaataaactaatggcatcagcaacatgctggaaatcaaacgtatgggtaattaatttttctggtttaattaaccctttacttaaccagtcgataacgatcgggaatttatttgcatttaagcgtgaagagaaaatagagagttcttttccggtaattccttgctgaatcacttcagacggttcactggagaaccccatcaatacaatacgtgccgctggagaagccagcgttacggcctctttcaggatagaaggatgacaagccgcatcgataattaatgtcggcttgatgcctttttcagtgaaaatctcgccaagcggtgtctggctgttattaatcgcccagtcagccccgctctctttcgctttttccagtcgttcatcaatgcgatcggcaacaatcacatttttaacgttatagacgccttttaatacctgaacgatcgtcaggccgattggaccggcaccataaaccagaacggtatcattttcagtcggttgaccatgtccggttacgttagccgcaatggtaaaaggttcgatcattaccgcatattgatcggccactgcttcaggaattttccacgcattttttgccggaaccacggcatattcactgaaaccaccgtcagcgtgcacacctaatacagccagtgtcgtacaaacgttcggtttacctatagagcacggatagcaatgcccacagctgaccaccggatcgacagcaacacgttcaccgactctggcgctttccacgccttcacccactgcatcaatgacgccaaagaattcatgaccaatgacgcgcggatatttcgcaaaaggattatgcccacgataaatatggctatctgaaccacaaattccggcaagtttcacttttactcgtacttcacccgctgacggggtgggtatttcacgttcgacaatcgccagttgattcggtttttcaattaatatgcttttcattatcttactccttaccagttccacagcgtgccatcttccagacgtgcgactggtagataagcaggttcatagggatatttcgccgccagcttttcatcgaattcgataccaagacccggtttgtctcccggatgcatatagccgttatcgaaagtccagttgtgcgggaagacttcgagcatttgttcggaataacccatgtattcctggacaccgaaattggggacccacagatcaaagtgcagcgccgcagccatgcagactggtgacaaatcggaaggaccgtgtgagccagtacgtacctgatacagcgaagcaaaatcggcaatccggcgcataccggtaattccgcctgcatgggtcagcgtggtgcggatataatcgatgagttgctcttcaatcagttgtttgcagtcccagatgctgttgaagacttcacccactgcgatgggtgtgacggtatgttggcgaatgagacggaagcattcctggttttccgcaggcgtcgggtcttccatccagaacatgcgataatcttcaatgcttttaccaaagcgcgccgcttcaataggcgttaagcgatggtgcatgtcatgcagcaaatgttcattaaaaccaaacttgttacgtaccgcgtcaaacaatttcggcatgaaatcgaggtatttctccgtcgaccacagctgctcttccggccactgtcctttggttgcgggttcataagccagacctttacctttcgacatgccgtaggtggttttcataccagggattccgcactgcacgcggatggctttgaatccaagctcttgatgacgggcataatcatccagagcttcatcaatactgtgaccggtggtatggcaataaaccatcaccccttcacgagacgcgccgccgagtaactggtaaagcggcatgttggcagctttggctttaatatcccacagcgccatatcaaccgctgaaatggccgacatcgtaaccggaccgcgacgccagtaagcacctttatagaaaaactgccagatatcttcgatacggtgcgcatcgcgaccaataagctgcggacaaaggtgatcctgcaaataagaggccacggaaagctcacgtccattgagggtggcatccccaaggcccgtaataccgtcctcagtggtgatttttaatgtgacgaaattacgccccggacaggtaacaaaaactccagcctttacgatcttcatgttcgattccttgcatcgcttgtcgtgatgcatgaaatctacgcaactgagctactaccatacaagtgtaaagatcgaaaaaagccggagtgatcacaaaaaaaggcgtatatttgcgctgtgaatggttgacaaaagatgaaatagaataccttttgtcagctgacacttcctcttatcttattgataaaatggatttatgttcctacgtgcgcccccagcccgcaacaatgatcaacatgccgcaaagcgcaatcaacgcacccgtccagtcataaagagtcagtttcacgccatccacaacgcgcagccacatcaacgccgtgcagacataaacgccaccataagccgcgtaaacacgcccactcgccgctggatgcaacgttaacaaccagacaaacagcgccagtgaaatccccgccggaagcaacagccagatactggcgtttcgttttaaccacaaccagggcagaaagcatccaataatttcacacagcgcagtagcaaaaaatagtaacgttgttttaatcatctttgtctcttattgacatcatgtatagttatagggcgacataatatcatcaatataaacaccctcctggtacgttttgcgtccgcagtggatggtgtagaatcacctttaatcattcatacagggaatgaattatgaaaatcactctcagcaaacgaatcggcctgctcgctattctgctgccttgcgcactggcattgagcacaactgttcatgccgaaactaacaaactggtgattgagtctggcgacagtgcacaaagccgccagcacgccgctatggaaaaagagcaatggaatgacacgcgcaatctgcgccagaaagtgaataaacgcactgaaaaagagtgggataaagccgacgccgcttttgataaccgcgataaatgtgagcaaagcgccaacatcaatgcctactgggagcccaatactttgcgctgcctggaccgtcgaactggccgcgttattaccccctaacctgttattgatttaaggaatgtaaggacacgttatgccaagcgcccacagtgttaagctacgcccgctggagcgtgaagatttacgctatgtacatcaactcgacaataacgccagtgtgatgcgttactggtttgaggaaccctacgaagcctttgttgaactctctgatctgtatgataagcatattcacgatcagagcgaacggcgctttgtggtggaatgtgacggcgaaaaagccggtctggtggagctggtggaaattaaccatgttcatcgccgcgcagaatttcagataattatctccccggagtatcaggggaaaggtctggcaacccgtgccgccaaattagcaatggactatggctttaccgttctcaatctctataagctgtatctgatcgttgataaagagaatgaaaaagcgattcacatttaccgcaagcttggcttttcggttgaaggtgaattgatgcacgagttctttattaatggtcaatatcgtaatgccattcgcatgtgtatattccagcatcagtatctggcagagcacaaaacaccgggtcagactctcctgaagccgaccgcacaatagcattaataataatcgatcgtatttttgatggtgtaaacccgttcgacggcgggttttactccttcatcaacaatgattagctgacagtccaccggattagcgtgactgtcatattcacagctctgttttacattaccaacccgttgattattcagtaaagtaaccgctgtgtaatctaattttttgatcggatccgttgatggcgtggcgctgacagataatgttttgtcgttacttttcgtggttttacccagcggataaccctgatcatcatagcgatattccatctgcatttgtttgctgctggctttaatcacgaagccattatcatcggtttcccaactcaccccggcagaaggtaattctgctagctggcattttccctgtaaacgtactctcttctccagcgtctcggcatcacggtaataattggcgtccagtaccagagcgaccacggtattattttccagatccagtaattcgagtgaatcaaaacagccttcttccgacaaagtcccagaaacacgtttcgtcacttcaccttgctcatccattaatgtctgagtgaaatcttttaccggaccacgcagcggatcaaaatcgaattcattagagaaactggccatctcaggggtaaatgaaagtgttacctctgtgcggtcacatcctgtgaggaatatcgcgagtaagcatggtagtaatttgtatttcacaacagtcaccagagagtagagatgattctcaatcatagtagcaaatacagtactttacacgttaaatgctatgcttaaagaagttatcttcgcgtaaggagcttatgatgaaactctcaacctgctgtgccgcgcttctgctcgccctcgcctcatccgcggtactcgccgcgccgggatcctgtgagcgcatacagagcgatatatcacagcgcattatcaataatggcgtacccgaaagcagcttcacgttaagtattgtacccaatgaccaggttgatcagcctgattcccaggtcgtcggccattgcgctaatgatacgcataaaattctctatacccgcaccaccagcggtaacgtctctgctcccgcgcagtctagccaggatggcgcgcctgccgaaccgcagtaacacattatcgactgaacgccggatatgacaaatccggcgatttgaacatacaacataatcccaccttattactcatacccttctattgatatggattaataattcttaacccaaaatgggtagactccctctattgttagcgcgctaaatattcaacatataaacttttatataacgataaagaacagggagtgagttatgtccaaaaatgaacgaatggtgggcatcagccgcagaacactcgttaaatctaccgcgataggttctctggcgctggctgcaggcggtttttctttgccgtttaccctgcgcaatgcagcagcagcggtacaacaggcccgcgaaaaagtggtctggggtgcctgttccgtcaactgtggtagccgctgtgcacttcgtctacatgttaaagataatgaagtgacctgggtggaaactgacaataccggcagcgatgagtacggcaaccatcaggtacgcgcctgtttgcgcggtcgctccatccgccggcgtattaatcatcccgatcgcttgaattacccaatgaaacgcgtgggcaaacgcggcgaaggcaaattcgaacggattagctgggatgaagccctggatactatcgccagtagcctgaagaaaaccgtcgaacaatatggcaatgaggctgtatatattcagtactcttcggggatcgttggcggcaatatgacccgctcttcgccatcagcctcggcggtcaaacgcctgatgaactgctacggcggttcactcaaccagtatggctcctacagcactgcgcaaatttcctgtgccatgccctacacctacggcagtaatgatggcaacagcaccacggatattgaaaacagcaagctggtcgtgatgtttggtaacaacccggcagaaacccgcatgagcggtggtggcatcacttatcttcttgaaaaagcgcgcgagaaatcgaacgccaaaatgattgttatcgatccgcgatataccgatacggctgccggtcgtgaagacgaatggctccctattcgcccgggcaccgatgccgcgctggttgcgggtattgcctgggtattgattaacgaaaatctcgttgatcaaccttttctcgataaatactgcgtcggctatgacgaaaaaaccttacccgcagatgcacccaaaaatggtcactataaagcctatattcttggtgaaggtgacgataaaacagcgaaaacgccgcagtgggcttcgcaaattaccggtatcccggaggaccgtatcatcaaactggcgcgtgaaattggcacagcaaaacccgcttatatctgccagggctgggggccacaacgccaggcaaacggcgaactgactgcacgcgctattgctatgttacctattttgacgggcaatgtcggcatcagcggcggaaatagtggcgcgcgtgaatcgacctataccattaccatagaacgcctgccggtgctggataatccggtcaaaacgtcaatctcctgcttcagctggacagctgctatcgatcatggtccgcaaatgacggcaatccgcgacggcgtccgcggcaaagataaactggatgtgcccattaagttcatctggaacttcaaggacttgaagcggacccttagtaggcctgaggtcctgcattgagtcaaggactttgtgtcaggctttgtgtcagccttgtgtcattagacgggatgtctagacggctggtcagcccccccggtggcctcggtctggacttgaggcgggctatgggggaagtctgctggcttaatgtattagatggtcattcacatttttctgtcagaaaccatcggtcccactgtgagtacaaacctaagccccccagaagcccacccacagccttagacagagtgtcgaatacattcacaccgagtcgaccggagaggtccatatagaggcccacagagaggaacacgagtttatagaccagagtcaggagggaccttaggtctgcggaagtcatagacataaagccccttatctgttatgttatattatcacattaaaaacaggtccagaccattggtccagaccatagttagttaatcatagtgataacccaccacctgaagtcctgctgatattcagtccagacttacctcttacccattggtcttacgcttcggtcttggtgaacttcaggcgtttgactacaggcaggacggcagtagctgagccagtgcccatcttgacggtcgtagcagcttcagcgacaacgaacactttaccgaggatttccagagagtgagactgagagtcaccatcacgggacaggaccgccgtaatgttttcaccatcgtggcggaagcaaccgaagctcagagccgtaaaacgcttagccatcatgaacacgccacggtcttcaccgttgtaatacgcaatatcagtccccagcatatcgacgatagcgtcttcaccaccgaagccctgcttagcagccagacgggagagagccttgaggtgtgactcatgggcgatgataccgtaatcagtaacctcagaaccgaaagaagattcggtgttgtcatacagagcgtccatgatagtgtctgccttagcggtcaggctgccagtcaggaccggaagctctacggtcttcaacagtttggaggactccagaacgtcgaccatgcgagcgttgatggtacggaccacattctcacagatgttcatagcgtcctgctgaagtgtgccctgagtgaatccggtggatgacttggcgtcccagagcttggtctgctcagagatgagaatagcctgctcgattggttcgaccacgatttcttgtccagacggaacggtcacgacttcaggtcgcttaccaccacggacaggaacgaccacagagcggtcagccagagtgtgagcaatgattggagtaggcaggctattgcgggtaggcaggacttctacagggaacgggatgttctcctgagcggatttcagcacaccattcagcattgtcttaaccagtttagccagctcaaaggcgtagacctgagggtctgcgttagttggcaaaccttcgttaatctgaatgttgtcggtgtcggtgatacgtactggctcaatgccgaactggaaagcgtctttaatcgtcataataatcaatctcctgaattagtttggatactgtgggtcccgacatcaggtcaggaccacttgtgtgtctgtgtcttagaggctgtccatccagttgtccgtggactcaatgtcagcgaccatagaagcacgggagcgcccagcggaatgggtagcactgcggaggtgctcaccataggtccggcgttcagctttgacctgttcacggcgctgtagctctttctgccactctgcatcagtcatgttctcttcacgcatacgctcagcctgaatgcgctgctctttagcaatacgctcagcttcggctcgcttgttctgctggcggcgaccataggcggtcatcaggtcattactgaagaagttgccaatggtcacgccagcttcagccagagcttccagtaactccatcgcctcgcggctggtggacggtaagcctgacaggtagcccggaatcagggtcttaatcgccagagacagcggataggactgaccgtccagactcacagtgttttcataaaggttgatgtcggtgactgacagcttccagtcgttgttgttgaataacataaggtgtactcctattgagaaggtgagaactatcggtatcgcagacacagttatgcctacgggtctccccgcatcggtcattctcaaaaggtgtttaaattaggcagacagtttcatagcgaccagttgcgctatcagctcgtctcgtgattggtgctggcgggtcttatcttccgggtccagaccaagctccttcaggaggacttcagtccggtagccacggtaacggagagtcatgcggccctcaggcgtacgagggtcaatcatagccatgattacttacctccacggttaagacgcttctgtgctcgacgctcagcagcctttaagcggtcaccatcagctattagctctctccacttctgggcgttcccctgcatccatgcgtagcctttagctgtcacctgccatgtgtctttacccatgactgacttagtgacgaatagtccaatactgaacgccttctcctgaggtcgaagctcgtcggcgtaactgtcagggttccacttctggacgaacttaccggagcgcttcaagccctctttcagtttcatcggggcaagacccaaagatttacacgcccagttccacggaacagagccaccattggtcagacgaccgtcaaagatgtctgccttaggtgctgcgatggagaggttagcgttagcctcgtcagcctgtttgaccgctacacgctctcggacgattgcgtcgttacgcataaagatgaaagcattgatgaccatcaggtagaaatctgtagagacccacatagcataagccacggtcccagcctcggtcgcccatgtaccaccgccgtcaccattcacggtccggaaatttccggagcggtcaagttgtgtgcgaatcttgttattccactcagacggcatcttgcttgctggaagacctaacactcggtgaatctcgttcaggttccacatgcgctggtcgttgcagatgaatgaatgaccctcgatgacgataggtaatgcttcaagctggctcatggtcatcttagaagtcctcccactcgctgttatcctctgacatttctacctcggggttatcaccgtcgatagacttgaagcggtcaggcaggacgccgatagtctcagacgcaacgtaacgaaccaccgccagccagagagtaaggtccgcccacataaggtaggccagcactgccacaaagctgccacacagggtcttctgtacactgtcaaacgacacctctccagcctcttctaatgcacgagactgtcggctgcgccactgtgagaacgtcttgttagcaggcaagccagcagcttgatggacctcaagcatgtcgaaccagacaccctcattgatggcgttaggtgtagacaggatggtcttaccgttgataacgatggatttaatagtcatataaaggatgctcctttggtaaagcactttctgtctccacgtggagtccgcacctattcaatgcatccaaacggacccaccaaaaaatgcttaacgaaagtgaatagggttaatgttgattagtgttggtctggagtgaccatgttctccatgtgcatataaggtgagaccgcatgtcaggacgagctgtaaggactccagatggtgagcggtgatagacttaagccaatgagatgactgaagaacgctaacgagctggaggtcatacaggaggtctgacagaggcggtcacgggccttgattacttaggagagatacttaatgtcggttgaccagatgctcgcatgttctgacgcatcagactcagaggcgaaatgtggtctccctatagtgatagtttagggtccgtaatcatgaaccagctttactggcgtggtaatggacggatttactggtgctgacgacggcagcatagacgtagcgagcgtagcgagttgaaaccataggttcacccaaggcaacacgcttacggctcagggactcctgcacagcgcttacagttaatgtgtcgtgcgttagtagttgggtcagaatcaagtatgggctgacaggcttggtattgcttgccattgattcgctcaggcgaccagcaccagttaggacatcatccagccagccgctcaagtcaccctgaccatcgaatgacagcaggtccccgcagtgctgctgcaagtaggctttggtgaacgtgttgtcgtgagtcgcgattggtcgtgccatagagtatctcctgtagttgaattagttggttccctatagtgataatcaagtccaccactggtgatgcatacagtagcgcgacaggatgtgactcacaggctggactggatgtcaaggattaaggcgaccctaggaattaaggaagtaaatataaagagggaggaccggatgtgactcacaggttggaccgaatgtcaaggactaaagacgcctcaggaattaaggaagtatatataaagagagaccagaggcgactcacagttaaacaggaatgtcaagaggagacataggaatttggagggacctgagtttaggacgcagtttaaataagaccacagacagacttagagtcggacagccgaaggcgaaccagtgggcctatagtcaggagggattatgattattatcaccctccataacttcagtcagacttcagtgacccaaggtctcaaccatcaagccgtatatggtctccaccttgggtcttcctacttaaagtaaagctgtcttcagcacctcagccagcctaccaacagcgtgtcctttcccgtacaggtcatacgtaattgactgactgctatggcctaagatgccctgagcgtccaccagattgactccacgctctttcattcgggtcgccagccaatgcctcagactatggagagaaacgttctcagcgtctcccagtgcctcagtcaggaccctagagttaaaccagctagagtaggcgctcggagtcatcccgaagagaggaccgccgtcgtcaggctgcgtgtctacccattcaaggaaggacttcaggtcgaacccacaggccccatcggtcagcggtacaagtcggactgaatgcttgttcttcacagacttaccgtccccatcttcattgatgtcgatgcaggttaaaccgttgtctaaggtgacaatgtcacgtttagtcaggtggcagacttcagcagacctcgcgccagtgaccacagacaccagagacgcccatctacgggcctcagaggtcgtgtgagccgtgtgtcgtgtgaactgatactcagactcaacacggaccagaagtctctccagctcctcgtctgtgaacgctctgcgcttggagtcgatatccttggtcagcttcatccgttcaatagggttgcggccctcaagttgcccattcatcaggccataatcaagacacatcttcgccttagtcagcagcttgttgattgtcgatggtctcacctcagcagccagcatggagtccctgacagccagccactcagagcgggacatcaggtccatgtcttcaggtaagaaccgagagacggtattcagtgaggacgacaggtccttgtagctggaggacttcagggtctggaccttctcagccagcagcgaggacactaggcttgaaaaaaccacagatggctgacgctcctgtgtgaaaactgctggtctatccccctgctcattcttcagaattgacgtagagtcgcctatagttgagtaatcagtatggttattatcatcaatcagcttaatcagaccagaggcatcaccagtgtctaccctctgctgtgctgcggtcaggacttcaagcgctaaccttatgcccttctgctggtccagactcaaggcttgcgtagcggctagctccttcaggttggacttctcgtccaccagagtagcgacctcaagtccattccagtagtcatcactggcgtctgtcaggaactgctcagccatagaccggaggtggtccgtaagctcctgtagcgagacatcaggcctatccaacatgaaggacttagctgtggctgcaagctctctctgacgcattgtggctactctcctgtctgtgcttcgggtcgatactgaaagaaacgggatggtctgtcccttgagtctgaagcggatagtatatcgaccattggctctacggactaactgagggactgcaaggtccttgatttgtgtcagccttgtgtcaggacttgaggtgcagacttgctgatacagatagggagacccagagaaagaactggatggacatacagtattatcatggttaatgtcagtcatatcaggaccttaagtagcattgagtcaactacttcaagtccatccatccgtctgacaatggagtccatctggaactacgcgggaaataccctcgttaatcagcattctgacatcaacaaaacgcatgaaattctgcaggacgaatcgaaatgcgaaatgattgtggtcatcgaaaactttatgacctcatcggcaaaatatgccgacattctgctgccagacctgatgaccgttgagcaggaagatattattcctaacgactacgccggtaacatgggatatctcattttcctccagcctgtcaccagcgaaaaattcgaacgcaaaccgatttactggatcctgagtgaagtcgcgaaacgtcttggacctgacgtctatcaaaagttcacagaaggtcgcacgcaggaacaatggttacaacatctgtacgccaaaatgcttgccaaagatccggcgttaccgtcttacgacgaactgaaaaaaatgggtatctataagcgtaaagatcccaatggccattttgtcgcctacaaagcatttcgtgacgaccccgaggcaaatccacttaaaacgccttccggtaagattgaaatttattccagcaggctggcggaaattgcccgtacctgggaactggaaaaagatgaagtgataagcccattgccagtttatgcctcaacctttgaaggctggaactcccctgaacgtagaaccttcccactgcaactgtttggtttccattacaaatcccgtactcactcgacctacggcaatattgatctcctgaaggctgcctgccgtcaggaggtgtggatcaaccctatagatgcgcagaaacgtgggattgccaacggcgatatggtgcgggtgtttaaccatcgtggcgaagttcggctaccagccaaagtaacaccacgtattctccctggagttagcgctatgggccagggagcctggcacgaggccaatatgtctggcgataaaatcgaccatggcggctgtgtgaatacgctaaccactctgcgcccttcaccactggcgaagggaaacccgcagcacactaatctggtcgagatcgaaaaaatataacccacgacaaccataaattctggcatgacattttgtttgaaaagcaataagtgagtaatgatgaaaatccataccacagaggcgctcatgaaggctgaaatcagccgtagaagtctgatgaaaacctccgcacttggcagtcttgcgctggcaagcagtgctttcactctgccattttcccaaatggtccgggcggcagaggctccggtagaagagaaagcggtctggagttcctgcaccgttaactgcgggagccgctgtctgttacgtttgcatgtgaaagatgacaccgtgtactgggtggagtctgatacgacaggtgacgacgtctacggtaatcatcaggttcgagcgtgtttacgcgggcgctctatccgccgacggatgaatcatcctgataggttgaaatatcccatgaagcgcgtcggcaagcgcggtgaaggtaaatttgaacggataagttgggacgaagccctggataccatcagtgataatcttcggcggatcctgaaagattacggcaatgaggctgtacatgtcctgtacggaacaggcgtagatggcggaaacatcaccaactcaaacgtcccgtaccgtctgatgaactcttgcggtggttttctcagtcgctatggcagctacagtaccgcacagatcagtgccgcaatgagttatatgttcggtgccaatgatggcaacagcccggatgatatcgccaatacgaaactggtcgttatgttcggaaataacccggcagaaacgcggatgagcggcggtggtgtcacttactacgtcgagcaagcccgcgaacgttcaaacgcacgcatgatcgtcatcgatccacgttataacgacactgctgccgggcgtgaagatgaatggctgcccattcgccctggcaccgatggcgcactggcctgtgcgattgcctgggtactgattactgaaaacatggtcgatcagccatttctcgacaaatattgtgttggttacgatgaaaaaacgctgcccgccaacgcaccacgtaacgcgcattataaagcctatattctgggcgaagggcctgacggcatagctaaaacgccggaatgggcagcaaaaatcaccagcatcccggcagaaaaaattatccagttggcacgagagatcggttcagcaaaacctgcttatatttgtcagggttgggggccacaacgacattccaacggcgagcaaacatcccgcgctattgccatgctttccgttctcaccggcaacgtcggcataaacggcggcaactcaggcgtacgcgaaggtagctgggatctgggggtagaatggttcccgatgctcgagaatcctgttaaaacgcagatttccgtctttacatggacagatgccatcgaccatggtacggaaatgaccgcgacccgtgatggtgttcgtggaaaagaaaaactggatgtccccatcaagtttttatggtgctacgccagtaacacattgatcaatcaacatggcgacatcaatcacacccatgaggtgcttcaggatgacagcaagtgcgagatgattgttggcattgaccacttcatgacggcctcggctaagtattgcgatatcctgttgcccgacctgatgccaacagagcaagaagaccttatctctcatgaatctgcagggaatatgggctatgtgatcctcgcccaacccgcaacctcagcaaaatttgaacgcaaacccatctactggatgctgagtgaagtcgccaaacgcttaggaccagacgtttatcaaacctttactgaaggtcgcagtcagcatgaatggatcaaatatctccatgcgaaaacgaaggaacgtaaccctgagatgcccgactacgaggagatgaaaacgaccgggatctttaagaaaaaatgcccggaagaacactacgtcgctttccgcgcattccgtgaagatccacaggcaaacccgttgaaaacaccttcggggaaaatcgaaatttattctgaacgactggcgaagattgcagatacctgggaattgaaaaaagatgaaattattcatccccttcctgcgtataccccaggttttgatggctgggacgatcccctgcggaaaacctatccactgcagttaacgggcttccattacaaagcgcgtacccactccagctacggcaatattgatgtgttacagcaggcctgcccacaagaggtgtggatcaaccccattgatgctcaggcacgcggtatccgtcatggcgataccgtgcgggtatttaacaataatggagaaatgctgattgccgcaaaagtgactccgcgtattctgcctggcgttaccgccatcgggcaaggtgcgtggcttaaagcggatatgtttggtgaccgggtcgatcacggcggcagtatcaatattctgacctctcaccgcccttcaccgctggcaaagggaaacccgtcgcacagcaatcttgtccagatcgaaaaggtttaaggagtagcccatgaccacacaatatggattttttatcgattccagccgctgtactggctgtaaaacctgcgaactggcgtgcaaagattttaaagatcttggcccggaagtcagtttccgccgtatttatgaatacgctggcggcgactggcaggaagataatggcgtctggcaccagaacgtgttcgcttattatctctccatctcctgtaaccattgcgatgaccccgcatgtacaaaagtctgccccagcggcgcaatgcataagcgtgaagatggctttgtggtggttgatgaagatgtttgtatcggctgccgctactgccacatggcttgtccgtacggcgcgccacagtacaatgctgaaaaagggcacatgacgaagtgcgatggttgttattcgcgcgtcgccgaggggaaacaacccatatgtgtcgaatcctgcccgctgcgtgcacttgagttcggtccaattgaagagctgcgccagaagcacggcactcttgctgccgtcgcgccactgccgcgcgcgcatttcacaaaacccaatatcgttatcaaacctaacgccaacagccgcccgaccggcgataccactggttatctggctaatccggaggaagtgtaaaatgggaaatggatggcatgagtggccactggttatctttaccgtattgggtcaatgcgtagtaggcgcgctgattgttagcggaattggctggttcgccgccaaaaatgacgcagaccgtcagcgtattgtccgtggcatgtttttcctctggctgttgatgggcgtcgggtttattgcctctgtcatgcacctgggatcgccactgcgggcgtttaactcgctgaatcgaatcggagcttctggtctgagtaacgagattgctgccggttccatattttttgccgttggcggattatggtggctggtggcagtcatcggtaaaatgccgcaagcgttggggaaactctggttacttttcagcatggcgctcggcgtcattttcgtctggatgatgacctgcgtgtatcaaatcgacaccgtgccaacctggcataacggttacactacgctggctttcttcctgacggtattgttgagcggtccaatacttgctgccgcaattctgcgggcagctcgcgttacatttaataccacaccatttgccatcattagcgttctggcgctgatcgcttgtgccggggtgattgtgctgcaaggtttgtctctggcgtctattcactcatccgtgcaacaagccagcgcactggtaccagattacgcctccttacaggtctggcgtgtggtattgttatgcgcaggtcttggatgctggctttgcccgctcattcgtcgccgtgaacctcacgttgccggacttattctggggctaatcctcatacttggcggtgagatgatcgggcgtgtgctcttttatggcctgcacatgacagtaggaatggctattgcaggttaacaaattggtgcggggcaacccgcacatttcaggatgttaggaatgacccatttttcacagcaagataatttttctgtcgcggcgcgcgtgttgggcgcgctgttttattacgctccagagagtgcggaagccgcacctctggttgcggtactcaccagtgacggctgggaaactcagtggcctctaccagaagcgtcattagcgccgctggtgacggcttttcagacacagtgtgaagagactcacgcccaggcctggcagcgtttgtttgtcggcccgtgggcactgccgtctccgccgtgggggtcggtctggctggatcgcgaatctgtgctgtttggcgattcaacattggcacttcgtcagtggatgcgcgagaaaggcattcagtttgaaatgaagcaaaacgaaccggaagatcattttggttcactgctgttgatggctgcgtggttggcggagaatggtcgccagacagaatgcgaagaattgctggcatggcacctttttccgtggtcaacacgttttcttgatgtttttatcgaaaaagcagaacaccctttctaccgtgcactgggtgaactggctcgcttaacgctggcgcaatggcaatcacaactgttaattcctgtcgcggttaaaccgctgtttcgataggatcaccgtaatattgccggatggtgacgattacgcgcaatccggcaataataggttacagtgtcacgtttttttatctcttaaagcacgcactgcttttgcggctggcctcttttgccgcaaaatagtcgcccgtgtttcattgcccatttctgctcatgcatcatctacacatctatccggatctgcgcactatgttccgccgtctgcttatcgcaacagtcgtcggtattctcgcggcctttgccgttgccgggtttcgtcatgcgatgctgctactggagtggttgttcctcaataatgactccggcagtctggtcaatgcagcgacaaacctttccccctggcgacggttgctaactccggcgctcggcggactggcggcgggtttgttgctgatgggctggcagaaatttacccaacaacgccctcatgcgccgaccgattatatggaagcgttgcaaaccgatggacagttcgattacgcagcaagcctggttaaatcgcttgcctctctgctggtagtaaccagcggcagtgcaattggtcgcgaaggtgcgatgattcttttagctgcccttgccgcctcctgttttgcccaacgttttacgccacgccaggagtggaaattatggatcgcctgtggggccgcggcgggaatggctgcggcctatcgtgccccgcttgctggcagtttatttatagccgaagtgctgtttggcactatgatgttggcctctctcggcccggtgattatttccgccgtcgtggcattgctggttagcaatctgattaatcatagcgacgcgttactctacaacgtacaactctcagtgacggttcaggctcgtgactatgcgctgattatcagtacaggtgtgctggcaggtctgtgcggaccactgttgttaacgttaatgaacgcctgtcatcgtggatttgtgagtctcaaacttgcgccgccctggcaactggcactaggcgggttgatcgtgggtctgctttccctgttcacacctgcagtgtggggcaacggctatagcaccgtacaatcctttttaaccgccccaccactgttaatgatcattgccgggatcttcctttgtaaactgtgtgccgtgctggcgagtagcggttccggcgcacccggtggggtctttacaccgacgctatttatcggtcttgccattggcatgttgtatggtcgtagcctgggattatggttccctgatggcgaagaaattacacttttactcggattgaccgggatggcgacactgttggcggcgaccacgcacgcgccgattatgtcgacgttgatgatatgtgaaatgaccggggagtatcagctactccccggtttattgattgcctgcgtaattgcgtcggtaatttcgcggacgttacaccgtgactctatctaccgccagcacactgcgcagcatagctaagcggatgtattgccccagttcacgctgttcggcgcgcggcagataaggcagttcaccaatgagcggtgccggaagttttttacccagcacatcaatgatttccgcataatgcgccagtcctgggttgattcggttagccacccagccaatgagcggcagcccgtcgttggcgatcgcctgagctgttagcagtgcatggttaatgcaaccttcctgaataccgacaaccatcaacaccggcagttgttcctgcactacccattcagagagtggacgcaaatcattcatcagactgcgccagccgccagtcccttctaccacgacatgatcgactttttcggtcaggtttgccaggccgtttgaaatgagggtgtaattgattgggcaactgtgcgccacgctactttcttcttcgcttaacgcgataggattaactgcttcataaggcagttcgatggttgaaacactctgcaacaccagggcatctttattacgcagcccttcgggtgtctctttgctccccttcgctacgggtttatatcccgcaaccgtttttccctgggaggctaacgcttgtagcaatgcgcgggaaaccaccgttttccctacagaagtgtctgtaccggtaataaagaaacgcttcagcatcactaactccaccgttatgcttcacaaatataaaccaggaaaataattaaccttgaaagtctaagttatgctttcctggcccaaattgagatagcgcaaattttggtagaacagttaaaaaatgttaaccctgcaacagacgaatcaacaaagaaccgttatacatcgcgtcttttaccagtgcagcgcctgccatcgtgccctggttagaaaactgagtactctcaacgctgatgtgctgactatacgcaggaagggcctgctgacggatgctgtctgagatgaccgggaagaggatatctgccgctttacttaacggtgagccaatcagtattttttgtgggttaaataaattcaccatgatggcaagaatgcgcccgacatgcgcgcccaccccggtaatgatgtcttttgccagtagatcgccgcgcaatgccgcctgacacaatgagtccacggttaacggttgtccatgtaacatcgagctcatggattgattaagacgcagctgtgccagctcaagaatactgtccacgctggcgatggtttcgaggcagccgtgattcccgcaataacagcgtttcccatacgggtcgacctgtgtgtggcctatttccacgagactactgctgcctgcgtgtagcagatgaccatcggtaatgacgcccgcccccacgttgtgatcgataaccacctgaatcacatcgcgcgccccgcgtgaggcaccaaacaaggcctctgccatcgtccatgcgctgatatcatgctgaatataaaccggaacgccggtatgctgctccagcgcctcgccgagcggcatctcttttacatcctcgtagaacggcatgcgatgtacaataccattttccgtatcaataattcccggcaaggttatggcaatcgaagttagacgctcaagttttttctggtggcggataaaaaactgatcgatatgggaaataatacgatccagcaatggcaagtcatcttttaacgccagttcctgcgactcttccaccaccagtttgctgctcagatcgcgcagagcaaggaaaatctccccgcgactaatgcgcagagaaagatagtgccaggcttcagtttcaaccaccagccccaccgccggacggccacggttccccgcttctttgatttccagctcttgcaccaggtgtgcttcgagcatctcacggacaattttagtgatactggcaggagccagttgcgccagacgggaaagatcgatacgcgagactggaccaagctgatcaatcaggcgataaaccgcgcccgcgttggtctgctttatttgatcaatgtgcccaggctggttttcagcaaccaccgcatactccctatattttcgcgctccgaaataatctgtaggctatggtgaagcacttcaatacgtgtcgtcaaatttttacttaggcatgtgattaacagcacatttttcgggctttttcgctgaaatttccctcacctgagagcattcagcagatgaatacgaaagttacgcgcagccggactttgttcatgatgtttcggccagaccaaccacatttcagaaaccgcatcctcttcagcaatcggcacccagcgcatttcgttgagctgaacacgtttaaatgacgcaggcaaaattgaaacacccagaccggcggaaaccagaccgatgatggtcattgcctcgcccacctcctgagtgatgacgggcgtcaaatggtaacgtcgcatcagcccgagaatatcgtcatacagccctgtcccgacgtgcggatcaaaaaagacaaagggttctttcgccagttcagccagcgttacattcgggttatttgccaggggatgatcgtgcgggatcatcgccataagcggttcatggacgatgactgcgtgttcaagcgactccggtaacgctgtgttacgcagcaatcccatatccagcgttccttcaatgagcggagcgatttgctcgcgagtgttcatttcgcgggtttgtaaatggacatcaggataatcacggcgaaacagcgataacgtatcggacaccgcccgaataaaaggagccgacgaagtaaaaccaatgcgcaactcccccgcttcaccctgatgcagcctttcagcgcgagcggcagcgtcatccaccatagacaggatttgccgactatctgcaagaaactgttttcctgctgccgtcagcaatacactgcgattggttcgtgccagcagtcgggcaccaatttgttgctccagcgcctgaatctgctgacttagcggcggttgcgaaatattcaggcgggcagcggcgcgcccgaaatgcagctcttccgcaacagcaacaaagtaacgcagatgacgaagttcaatattcatatttaaaacatcttatttgagattattaatatattagacagaacaattcgattttcctaccctatgtataagcctgatctacaggcatatttagcaaggatttcaagtgagccgtactacaactgttgatggcgctccggcaagcgacactgacaagcaaagcatttctcagccaaatcaatttattaaacgcggtacgccgcaatttatgcgcgtcaccctggcgctgttctctgccggactggcaacatttgcacttctctattgtgtgcagcctatccttccggtgctttcgcaggagtttggcttaacccccgcgaacagtagtatttcactgtccatttccacggcgatgttggctattggtttgctgtttactggcccgctatccgatgccattggtcgcaaaccagtgatggtcacggcgctactgttggcctccatttgtacgttactttcgacaatgatgaccagctggcacggcattttgattatgcgcgccttgattgggctttcgttaagtggcgtggcagctgttggcatgacttatcttagcgaggaaatccatcccagtttcgtggccttttcaatggggttgtatatcagcggcaactcaattggcggcatgagcggacgcttaattagcggtgtcttcacggactttttcaactggcgaattgctctggcggcaatcggttgtttcgcgctggcctcggcgttgatgttctggaaaatcctccctgaatcacgccattttcgcccgacttcgctgcgccctaagacgttgtttatcaactttcgtctgcactggcgtgaccggggattaccgttattgttcgcagaaggctttttgctgatggggtcgttcgtcacgctgtttaattacatcggctatcggttgatgctctccccctggcatgtcagtcaggccgtggttggcttattatcgctggcttatttgaccggtacatggagctcacccaaagccggaaccatgaccacccgctatgggcgtggtccagtgatgttgttttcgacgggggttatgctgtttggtttactgatgaccttattcagctcgctgtggctgatctttgccggaatgttactcttctcagcaggattcttcgcagcccactcagtagccagcagctggatcggcccccgcgcaaaacgcgctaaaggccaggcctcctcgctgtatctgttcagttactatctggggtcgagtattgccgggacgctgggtggtgttttctggcataactatggctggaacggcgtcggcgcatttattgctctgatgctggtcattgctctgctggtcgggacgcgtttgcatcgtcgtctgcacgcctgaaaaataagtccggactgcggtaaatacccgtccggacttattgccagctcaaaccaacgttaatagccatcctaaaatagacgaagcgccagccaattcccgcagcgcgtctagcgtcatcaggattataagtacccaaataaacggattcattttgctgtgtgtcatttattactgatgcgcagttattctactgctttgtaagtagtaaaatagttaacccgatcaagactactattattggtagctaaatttcccttaagtcacaatacgttattatcaacgctgtaatttattcagcgtttgtacatatcgttacacgctgaaaccaaccactcacggaagtctgccattcccagggatatagttatttcaacggccccgcagtggggttaaatgaaaaaacaaattgagggtatgacaatgaaaaaagtattagctctggttgttgccgctgctatgggtctgtcttctgccgcctttgctgcagagactacgaccacacctgctccgactgcgacgaccaccaaagcagcgccggcgaaaactacacatcataaaaaacagcataaagcagcacctgcccagaaagcgcaggcggctaaaaagcatcataaaaatacgaaagctgaacagaaagcccctgaacaaaaagcgcaggcagcgaagaaacacgccaagaaacacagccatcagcaaccggcaaaacctgctgcacaacccgcagcgtaagttttcaacagtaatgctggcgcgccccctcgcgcctgaaaattacggtgctaagcgggtaacgtttagcaccgcctttagcggagggtagtatggtgggccgttatcgctttgagttcattctgatcatccttattttatgcgcactgattgccgcccgtttttatctttcctgattgtagttatctgattttactcccactttcatcccgtcccgtctatagtatttatgagggtttgcttttaataatcataattacccaccagagtgtgatatgcgtacaaccattgctgtagtgttgggtgcaattagtttgacgtctgcttttgtgtttgcagataaaccagacgttgccagatcggcaaacgatgaggtcagcaccctgttttttggtcatgatgatcgtgtgccagtgaatgacacgacccaatcaccgtgggatgcggttgggcaactggaaacggccagcggcaatttatgtacggcgacgctgattgcacccaatctggcattaacggcaggacactgtttattgacacctccaaagggtaaagccgataaagcagtggcgctgcgttttgtgtcaaataaaggtctttggcgctatgagatccacgacatagaaggccgcgttgatccgacactgggaaagcggttaaaagcagatggggatggttggattgtacctcccgcagccgcgccgtgggacttcggattgattgtgctacgtaatcccccttctggcattacgccgttgccgttatttgagggagataaagccgcgcttaccgccgcattaaaagcggcaggtcgtaaagtgactcaggcaggctaccctgaagatcatctcgatacgttgtacagtcatcaaaactgtgaagtgactggctgggcgcaaacgtcggtgatgtcacatcagtgcgataccttgccgggtgacagcggttcgcctctgatgttgcataccgatgacggctggcaattaattggggtgcaaagttcggctcctgccgcgaaagatcgctggcgcgccgataaccgggccatttctgttaccggttttcgcgacaagctggatcaactgtcgcaaaaataatgttcaaacgctgcccgacagcgcgggcagcgtcttcatcaggcaagtttcaccatgatcattccagccaacagcaagaccaggccaatccagcctttacgatttaaccgttgaccaaacaagatccaacctgcggctaacgtggcggcaataccaaacccgccccacaatgcataagcgacagacaagtcgatccctttaacggcttgagaaagcgcactaaaggcagccagcaccgccgccagggagagcaagccaaatattttgcgacgaaagccgtcagaaaatttcaaaaagacgttagcaacgatttccagcacgattgccaatgccagccaggcggcgtgaacccattcaaactgcgccatggttcacctccagttcaggtttacgcgctttacgggtacctgattttatcaacacaatcccggcgaccagggtggttaacccggcaattttcatcagcgataaactttcgtcgaataacaaaacgctaaacaaggtaataaataaaataccgataccttcccacagcgcataagctacgcctaaggcgatttttttaacggcgaaagagagaaatatatacgacagagaaatcatcaccagcattaaaataaagccgccatttccctcactgacgctcgcccatttcattgacagcgtaccggtaatttctgtagcaatagccagacctaataaaatccaataaatatacattgtccttctcctgcaagagaattattttaattttcgcttaattcagcgaaaccaaagtaaagtggtcaagccccgcgcatagcgcaagctttggcagaagaaaggactaaagcgcgttgcgccagtgctgctcacctacgagcaagatagtggatgaggtacgaagatgggtaaatgtagaaaataacgtcctgaacaaattgtccataatattacaattatccgcagtgttgcttctcgtcatcgcggatgataattgtcctcggtagttgaacacgcctgatttgtatcatagcttaagaattaactcaaaatattttcacttctttacctgagcggtttgattttcgttatgatgacggagcgaaaaagacattattattagcaaaggaagaaaaaacggggacaagcatggcaaagccgatcatcacgctcaatggcctaaaaatcgtcattatgttgggaatgctggtcattattctctgcggtatccgttttgccgccgagatcatcgtgccgtttattctcgcattatttattgctgttattcttaacccgctggtgcaacacatggtccgctggcgtgtgccgcgtgtactggcggtgtcgattttgatgaccatcatcgtgatggcgatggtgttgctattagcttatctgggttccgcgctcaacgagttgacgcggacgttaccgcaatatcgcaactctattatgacgccgctgcaagcgcttgaaccgttgttgcaacgcgtagggattgacgtctcagttgaccagctggcgcattatattgatccgaacgcggcgatgacgttgctcaccaacttattgacgcagttatctaatgccatgtcatcaatatttttattgctgctgacggtgctgtttatgctgctcgaagtgccacaattgcccggaaaatttcagcaaatgatggcgcgtccggttgaagggatggcggcgattcaacgtgcgattgacagtgtttctcattatctggtgctgaaaacagccatcagcatcatcaccggcctggtcacctgggcgatgctcgccgcactcgatgttcgcttcgcttttgtctggggattgctggcctttgcgcttaattacatcccgaatattggttcagtcctcgcggcaatcccccctatcgctcaggtactggtgtttaatggcttctacgaagcgttgctggtgctggcgggatatctgctgattaatctggtcttcggcaatattctggagccgcgtatcatggggcgtgggctggggctttccacattggtggtatttttgtcgttgattttttggggatggttgttaggaccggtgggtatgctgctttccgtgccgttgacaattattgtcaaaattgcgcttgaacaaacagcgggaggtcaaagcatcgccgttctgttaagcgatctcaataaagagtgacggcctcagcagaggccgtcagggttacagagctttcaggattgcatccacgctggctttggcgtcaccaaacagcatgtgggtgttttccttgaagaacagcgggttttgcacaccagcatagccagtgttcatcgaacgtttaaagacaatcacgttctgcgctttccacacttccagcacaggcataccagcaatcggactcttcggatcatcctgcgccgccgggttaaccgtatcgttagcaccaatcaccagtacggtatcggtatcagcaaagtcatcattgatctcgtccatttccagcacgatgtcatacggtacttttgcttcagccagcaatacgttcatatgtccaggcaaacgccccgcgaccgggtggataccgaaacgcacattaataccacgagcgcgcaatttctcagtaatttcagcgacaggatattgcgcctgcgcgactgccatgccgtaccccggagtaatgatcactgaatgggagtttttcagcagttccgctgtctcttctgcggtgatttcgcggtgctcacccacttcctgatcatcgccagtagaagagccgtcggtgccgaaaccacccgcaataacgctgataaaggaacggttcatcgccttacacataatgtaagaaaggatagcccccgaagaaccgaccagcgcaccggtcacaatcagcaggtcgttgctgagcataaagcccgcagccgcagccgcccagccggagtacgagttcagcatcgacaccaccactggcatatctgcaccaccgatggaggcgactaaatgccagccgaataccagcgcaattgcggtcattatcagcaatgccagcacttgcaggccgacgctgtccgtgcgaacaaatacaatcagcagcaggaaggaaacgaccagagccgccaggttcattttgtgacggtttggcagcatcaatggtttagacgaaatcttgccacacagtttgccgaacgccaccaccgaacccgtgaacgttaccgccccgatgaagataccgaggaacacttccgtcaggtgaatattgaccagaatcggtgccattcccgcgtcatgatgcagatagctgttaaagccaaccagcactgccgccagacccacgaagctatgcaggatcgccaccagttctggcatttcggtcatttcaactttcttcgccagacggataccaattgccccaccaatgaccatcgccagcaagatccagccaacattacccgtatccggtccaaaaatggttgcgattaacgcaatcgccatcccggcgataccgaagttgttaccctggcgagacgtttcatgtttcgaaagaccggccagactgaagataaacaggatcgcggcaacaatgtatgcagctgtaactaatcctccagacatatgttaccccttaatttttgcggaacattttcagcatgcgctgagtcacggtgaagccaccgaaaatattaatgctggctataagcaccgcgataaaactaaggaagctaacccagccgccctggccaatctgcaacagtgctccgacaacaataatccctgaaatcgcgttggtgaccgacatcaacggtgtatgcagcgcgtgcgatacattccacaccacgtaataaccgacaacgcaggccagcgcgaaaacggtgaagtgcccaaggaattctttcggcgcaacgcttgccatccagccaaaaagaatgattgccagcgccatcaacgcgtatttacgccacggtgagcaggtacatttttcctcagttttcacttccggtgccgctttttgtgccgcctgcggctgagctgatacctgaatcggcggtgccggccaggtaatttcgcccgcacggatcacggtcacgccgcgaatcaccacatcatcaaaatcaacagtgatattgccgtctttctctttgcacaacagtttcagcagattaacgaggtttgtgccgtaaagctgtgaggattgcgtcggcagacggcccggaagatcggtataaccaatcactttgacaccattttccgtagtgaagatttcacccggcacggtgtattcacagttgccgccgttttgggctgccaggtcgacaatcacactgcccgccttcatggagtcaaccatttcacgggtaattagcttcggcgctggtttgcctggaataagcgcggtggtgacaatgatatcgacctcttttgcctgggcggcaaagagttccatttccgctttgatgaacgcgtccgacatcactttggcatagccatcgccgctgccagcttcctctttaaaatccagctcgaggaattccgcgcccatactttgaacttgttctttcacttccgggcgggtgtcgaatgcacgcacaatcgcgccgagactgtttgctgcgccaatggcggccagacctgcaacacccgcaccaatcaccatcacttttgccggtggcactttcccggccgcagtaatttgcccggtaaagaagcgcccaaattcatgtgccgcttcaacaatggcgcgataaccggcgatgttcgccatcgagcttagtgcgtccagcgattgtgcgcgtgagatacgcggcacagagtccatcgccatcacggtcacgttacgttccgcaagtttttgcattaattccggattctgcgcaggccagataaaactcaccagcgttgtcccaggattcagtaacgcaatttcatcatctaacggcgcattgaccttcagaatgatctctgactgccagacgctattcccttctacaatttcagcgcccgcttgcacaaacgctttatcgtcaaaacttgccagttgacccgcgccgctctctaccgcgacggtaaaacccagtttcagcagctgttccactgtttttggcgttgctgcaacacgggtttcattggttaaccgttctcttggtatgccaattcgcatgatattcccttccatcggttttattgatgatggtttgcctgtgtcaggagccacacaagctgctcatgtacgagctaaatgttactccgttaaaataaattagtaacaaacgccctataacgtactgaaaattatgcctgtgatctagcgccaaaaatcagtatttcggcgtgaactcgcaaaatattaacgattcagccgtgatagtgggataaacaccttagaacgccggataaagactgataattgtcttcgacggtcgggtaaaacgagacatcgccccggcacgaatcactacttaacattaaattaacttatacaattcagttgcttcagtagtaatgatgctgatacggctgttttttaagcatagacggtcatttgagcaggattaaaattggcttaaggaatgtgatatgaaaaatgacgcagacagttacaccgtttaaatgcaataatcagccacgtttctcgttaataacaataccagtacctggtttgcgcaaggcgaaggattatttttatgaagcttaagaacaccctcctggcgtcggcactgctttctgctacggcattctccgttaacgcagcaacagaactgacaccggagcaagcggcagcggttaaaccttttgaccgtgtagtggttaccggtcgttttaatgctattggcgaagcggtgaaagccgtttctcgtcgcgcagataaagaaggtgccgcctctttttatgttgtcgacacttctgattttggtaacagcggtaactggcgtgtggtcgctgacctctataaagccgatgctgaaaaagcagaagaaacaagtaatcgcgtaattaacggtgttgtcgaactgccgaaagatcaggctgttctgattgaaccgtttgacacggtcaccgtccagggcttctatcgtagccagccagaagtcaatgatgccatcaccaaagcggcaaaagcgaaaggtgcctactctttctacatcgttcgtcaaatcgatgccaaccagggcggcaaccagcgtattactgcattcatctataaaaaagatgctaagaaacgtatcgtccagagcccggatgtgatcccggcagattccgaagcaggacgtgcagctctggctgccggtggcgaagccgcgaagaaagttgagatcccgggtgttgcgactaccgcatcaccaagttctgaagtcggtcgcttctttgaaacccagtcatcaaaaggcgggcgttacaccgtcacgctcccggatggcactaaagtcgaagaactgaacaaagcgaccgcagcgatgatggtcccgttcgacagcatcaaattctctggcaactacggcaacatgaccgaagtctcctatcaggttgcgaaacgtgccgcgaagaaaggtgctaagtattaccacatcacccgccagtggcaggaacgtggtaataacctgaccgtcagcgcagatctgtataaataactattcagttactcctataaggcggcttgatgccgcctttcgcatttttagtcacaaatttccccgcgaccattgcatgcagacacatctcttcgtaaaatcccgcgcttcagtggcaaactccatttttatgcgttttgccctaatatttattcttcttatcacgttttaatcactggatatcgatggaaaagaaactgggactgagcgcactcaccgcgctggtattaagctcaatgctgggcgcgggtgttttcagtctgccgcaaaatatggcggcagttgccagcccggcagcactgctcatcggctggggtattactggcgctggcattttattgctggcctttgccatgctgatcctcacgcgcattcgtcccgaacttgacggcggtatctttacctatgcccgcgaagggtttggcgagctaatcggcttttgttccgcatggggatactggctgtgcgcagtcatcgccaacgtctcctatctggtgatcgttttttccgcgttaagcttttttacggacacgccggaattgcgcctgtttggcgatggtaatacctggcaatcgatagtcggtgcatcggctttattgtggattgttcactttttgatcctgcgcggggtgcaaaccgctgccagcattaacctggtggcgacactggcaaaattgttgccgctgggtctgtttgttgtgctggcgatgatgatgttcaaactggataccttcaagctcgacttcaccggacttgcacttggcgtacccgtttgggaacaggtgaaaaacaccatgctgatcaccctgtgggttttcattggtgtggaaggtgccgtggttgtttctgcgcgtgcgcgtaataaacgtgatgttggcaaagcgacactgctggcggttctctccgctctgggcgtttacttgctggtaacgctgctttcgctgggtgtggtggcacgtcctgaactggctgaaattcgtaacccgtcaatggccggtctgatggtggaaatgatgggaccatggggcgaaatcatcatcgctgccggtttgatcgtttccgtttgcggcgcgtacttaagctggaccatcatggcagcagaagtaccgttcctggccgccactcataaagcattcccgcgcatttttgcgcgccagaacgcacaagctgcgccatccgcctcactgtggttgaccaacatctgcgtgcaaatttgtctggtactcatctggctgaccggttccgattacaacacgttgctgaccatcgcctcagaaatgattctggtgccctatttcctggtcggcgcgttcttgctgaaaatcgcaacccgtccactgcataaagcggtaggtgtcggtgcctgcatttatggcttatggttattgtacgcctctggtccaatgcacttgctgttatccgttgttctgtatgcaccggggctgctggttttcctgtacgcgcgcaaaacgcatacccatgataatgtactgaaccgtcaggaaatggtgctgattggcatgctgttaattgcctcagttccggcgacctggatgctggtgggataacgttcatcccatcgttggatagcaaaggagataacgatgggtaaaacccagcccttgccaatattaattactggcggaggtcgtcgcatcggcctcgccctcgcatggcatttcattaatcaaaagcaaccggtgattgtcagctatcggacacactatccagccattgatggactgattaatgcaggtgcgcagtgtattcaggctgatttttcgaccaacgacggtgtgatggcgtttgccgatgaagtactaaaaagcacccatggtctgcgtgctattttgcataacgccagtgcgtggatggcggaaaaaccgggtgcgccactggccgacgtactggcttgcatgatgcagatccacgttaataccccatacctgctcaaccatgcgctggaaagattactgcgtgggcacggacacgccgccagcgatatcattcactttaccgattatgtggtggagcgcggtagcgacaaacatattgcgtatgctgcaagcaaagcggcactggataatatgacccgctcgtttgcccgcaagctggcaccggaagtgaaagtgaattctattgcgccatcgctgatcctgtttaatgaacatgatgatgccgaatatcgacaacaggcgctgaataaatcactgatgaaaaccgcgcctggcgagaaagaagtgatcgacctggtcgattacttacttaccagttgctttgtcaccggacgcagtttcccacttgatggcggtcgtcatctgcgttaatgcagctttatccagcatataatcaacacccatgcgcttatcccccaacacgcaacagaaccaacaaaagcggcgggcaagcgcatcattccggtgaaataccacagcgacaccaggtaaacaaaatagggaataatcgaccacatactaaaaatgatggttgcgcgtaaggcttcaatgccgcgttcgctggcaacaatataatgcgcgataagcgcaaaggtcgggaaaagtggaatcagcccggcgatataataatttttcgtttttgctaaaacaccaatcaacagcactaccagcgcaccgagcgcggctttgattaccagccccatctttttaccttaacacttccataacaagtcatcagtagaatacctgatgaaaacttgtttagaaacgattgatagtaagtaaaaacagcgcggtgtattgtgacgtttttatatctaccgtgaatgttatgaacactatcgtatttgtggaagatgatgcggaagtcggttcactgattgccgcgtacctggcaaaacatgatatgcaggttaccgtagagccgcgcggcgaccaggccgaagaaaccattttgcgagaaaatccggatttggtgttactcgacatcatgctaccaggcaaggacggcatgaccatttgtcgtgatttacgcgcaaagtggtctggaccgattgttcttctaacctctctcgatagcgatatgaaccacatcctggcactggaaatgggtgcctgcgactatattctcaaaacgacgccccctgctgttttgctagcgcgtttacgtttgcatttgcgtcagaatgagcaagccacactgaccaaaggtcttcaggaaacgtctctgactccctacaaagccctgcatttcggcacgttgaccatcgatcccatcaaccgcgtagtcaccctggctaacactgaaatctcgctctcgacagctgatttcgaattattgtgggaattagctacccatgccgggcaaatcatggaccgcgatgcattgctgaaaaatttacgcggcgtcagttatgacggactggatcgtagcgtggacgtggctatttcgcggttaagaaaaaaactgctcgataacgccgcagaaccttatcgcattaaaactgtgcgtaacaaaggctatctttttgcgcctcatgcatgggaataagcgatgaaaaaactgtttatccagttttacctgttattgtttgtctgcttccttgtgatgtctctgctggttgggctggtgtacaaatttaccgccgaacgcgcgggcaaacagtcgctggatgatttgatgaacagttcgctgtatctgatgcgcagcgaattgcgtgagatccccccacacgactggggtaaaactctgaaagagatggatttaaatctctctttcgatctgcgtgtcgagccactgagtaaataccatcttgatgatatttccatgcaccgactgcgtggcggcgaaattgtcgccctggacgatcagtacacgtttttgcagcgtatcccgcgcagccactacgtgctggcagttggtcctgttccttatctttattatctccatcagatgcgattgctggatatcgccctgatcgcttttattgctatttccctcgcctttccggtgtttatctggatgcgtccgcactggcaggatatgttaaaactggaagcagcggcgcaacgatttggcgatgggcatctcaatgaacgtatccactttgatgagggttcgagctttgaacgacttggcgtcgcatttaaccagatggcggacaatatcaacgccttaattgccagcaaaaaacagcttattgacggtatcgctcacgaactgcgaacaccgttagtgcgcctgcgttatcgactggagatgagcgataacctgagcgccgccgaatcccaggcgttgaatcgtgatatcagtcaacttgaagctttaattgaagagctgctgacttatgcccgactcgatcgcccacaaaacgagcttcatcttagcgaaccagacctgccgttgtggctgtcaacgcatctggcagatattcaggcagtaacgcccgataaaacggtacggataaaaacgctcgtgcaaggccattatgcggcgttggatatgcgcttaatggagcgcgtgctggataatttgctcaataacgccctgcggtactgccattcaacggttgaaaccagcctgctactgtcggggaatagagcgacattaattgttgaggatgatggcccagggattgccccagaaaaccgcgaacatatctttgaaccttttgttcgcctcgatcccagccgggatcgctcaaccggcggctgcgggctggggctggcaattgtccactctatagcactggcaatgggcggtacggttaattgtgacaccagcgaactgggtggtgcccgcttctcgtttagctggccgttatggcataacatcccgcaatttacctctgcctgacactacgcgcacgatggtcaagtcaccacgactgtgctataaaataagtatgttgtaactaaagtggttaatattatggcgcgttacgatctcgtagaccgactcaacactacctttcgccagatggaacaagagctggctatatttgccgctcatcttgagcaacacaagctattggttgcccgcgtgttctctttgccggaggtaaaaaaagaggatgagcataatccgcttaatcgtattgaggtaaaacaacatctcggcaacgacgcgcagtcgctggcgttgcgtcatttccgccatttatttattcaacaacagtccgaaaatcgcagcagcaaggccgctgtccgtctgcctggcgtgttgtgttaccaggtcgataacctttcgcaagcagcgttggtcagtcatattcagcacatcaataaactcaagaccacgttcgagcatatcgtcacggttgaatcagaactccccaccgcggcacgttttgaatgggtgcatcgtcatttgccggggctgatcacccttaatgcttaccgcacgctcaccgttctgcacgaccccgccactttacgctttggttgggctaataaacatatcattaagaatttacatcgtgatgaagtcctggcacagctggaaaaaagcctgaaatcaccacgcagtgtcgcaccgtggacgcgcgaggagtggcaaagaaaactggagcgagagtatcaggatatcgctgccctgccacagaacgcgaagttaaaaatcaaacgtccggtgaaggtgcagccgattgcccgcgtctggtacaaaggagatcaaaaacaagtccaacacgcctgccctacaccactgattgcactgattaatcgggataatggcgcgggcgtgccggacgttggtgagttgttaaattacgatgccgacaatgtgcagcaccgttataaacctcaggcgcagccgcttcgtttgatcattccacggctgcacctgtatgttgcagattaacgcccggctttcatactgccgaccatctgttctggccgtacccagctgtcaaactcggcttcgctaagataccccagcgcaagggccgcagcttttaaggtcagcccttctttatgcgcttttttggcgatctcggcggctttgtcataaccaatgtgggtgttaagcgcagtcaccagcatcagcgattcattgagtaattgattgattcgctcacgattcggttcaatacccactgcgcagtgtttgttaaaactttccatgccatctgccagcaagcgcaccgattgcaggaaattgtggatcaccattggacggaagacgttcagttcaaagttaccggaagcgccccccatgttgatcgccacgtcgttccccatcacctgacagcagagcatggttaatgcctcacactgtgttgggttcactttccccggcatgattgagctgcccggctcattttccgggattgagatttcaccaattccgcagcgcgggccagaggccagccagcggacatcattggcgattttcatcagtgacgcagccaaccctttcaacgcgccgtgcgcctgaaccagggcatcacaggtcgccagcgcttcaaatttgttcggcgcggtaacaaacggtgcacaggtaatgactgccagttcatctgctacgcgacgcgcatactccggatgggtatttagtccagtacccaccgctgtaccgccaagagccagttccgctacgtgaggcaggctgtattcgatatgtttgagattatgctcgagcatcgctacccagccggaaatctcctgccccagcgttaacggcgtggcatcctgcaagtgagtacgaccaattttgacgatatcggcaaaagcacgggatttctcattcagtgtctgtgtcagggttttaagctgaggaatgagttgcttgcgcagcgccagcagcgccgcaacgtgcatcgccgtcggaaagacatcgttggaactttggcttttgttcacgtcgtcgttagggtgaactttacgttccatcccgcgcacaccgccgagtaattcactggcccggttagccagcacttcgttcatgttcatgttactttgcgtgccggagccggtctgccagatagccagcgggaattcgtcgtcatgctgtcctgccagtacttcatccgccgcctgacgaatggcgctcgctttctcttcagacaacaagcctaaatcttcattaacttttgccgctgcacgcttggttagcgccagcgcatgaatcagtgaggtgggcattttctccgtcgaaatgcggaaatgctccagcgagcgttgagtttgtgcgccccacagcttatctgccgggacatcaatcgcccccatcgaatctttttcgctgcgtactgtattcatgacctgctcctcacctgattaattttttctttctgttttgctttcgttaagcaacttttagctcacttattatttaccatttgataacaaatgtttggtctttcgtgccatgtaaaaaaaccgccccgaagggcggctctgtttatttcacacagcgggtgcattgtgtgagttgtatctgctggaagaagtcatttcctttatcatccacaaggataaacgccgggaaatcttccacttcaattttccagatggcttccattcccagttccggatattcaacacattccaggctcttaatacttccctgcgccaatacagcggccggaccaccgatactgccaaggtagaagccgccgtgttttttacaggcatccgtcacctgctggctgcggttgcctttcgccagcatgatcatacttccgccctgcgcttgcagttgatcgacataagaatccatccgtccggcggtcgttgggccaagagaaccggaggcataaccttccggcgttttggccggacccgcgtagtaaatcggatgatctttgatgtactgcggcagcccttcaccgttatccatccgctctttcagtttggcgtgagcaatatcacgaccgacgataatcgtgccgttaagcgataagcgtgtagaaacgggatactgcgacaactgtgcgaggatctctttcatcggacggttaaggtcaacgcgcaccgcttcgccttctcccgctttgcgcagctcttccgggatatatttgcctggattatgttccagtttttcgatccagatcccctgacggttgatcttcgctttgatattacggtcagcagagcaggagacgcccataccgaccgggcaggatgcgccgtgacgtggcaggcgaatcacgcggatgtcgtgagcgaagtatttaccaccaaactgcgcacccagaccaagattttgcgcttcgatcagcaattctttttccagttccacatcgcggaacgcctgaccgtgctcattcccttccgttggcagttcatcatagtatttcgcggaagccagtttcaccgttttaaggttcgtttctgcagaagttccaccaataacgaacgcaatatgatacggaggacaggccgccgtacccagcgtgcgcatcttctcaaccaggtaatttttcagtttccccggcgtcagtaacgctttggtttcctgatagagatacgtcttgtttgccgaaccaccacctttggcgatacagaggaatttgtattcgtcgccatcaacggcataaagatcgatctgcgctggcagattggtgccggtattcacttctttatacatatccagcggcgcgttttgcgagtagcgcagattatcttcgatataagtgttatagacaccgcgcgccagcgccgcttcatcaccaccaccggtccatacacgctgcccttttttaccaacaataatcgcggtgccggtatcctgacaggttggcagaacgcctttcgccgcgatgtcggagttacgcaggaattgcagcgccacatatttatcattttcgctggcctccgggtcacgcagaatgtcggccacctgttgttggtgcgccggacgcagcatgaacgacgcatcatgaaacgcctggcgcgccaacagagttaacgcttcgagtgcgactttcaaaatctcctgcccttcaaattcagatacgctaacgtgttcgctggttagcaggtaatactcagtatcatcttttttgagtggaaaaggagcctgataatgaaagggtttgtttgacattgttctctcacttactgcctggtttggttatgctctgggcgggtgttccgttgccctgttaaaagcgagtaacaatatcctacacacttttttaacaaaaactgagactagtacgactttttgcggctccaggttacttcccgtaggattcttgctttaatagtgggattaatttccacattaaaacagggattgatcatgcaaaaactcattaactcagtgcaaaactatgcctggggcagcaaaacggcgttgactgaactttatggtatggaaaatccgtccagccagccgatggccgagctgtggatgggcgcacatccgaaaagcagttcacgagtgcagaatgccgccggagatatcgtttcactgcgtgatgtgattgagagtgataaatcgactctgctcggagaggccgttgccaaacgctttggcgaactgcctttcctgttcaaagtattatgcgcagcacagccactctccattcaggttcatccaaacaaacacaattctgaaatcggttttgccaaagaaaatgccgcaggtatcccgatggatgccgccgagcgtaactataaagatcctaaccacaagccggagctggtttttgcgctgacgcctttccttgcgatgaacgcgtttcgtgaattttccgagattgtctccctactccagccggtcgcaggtgcacatccggcgattgctcactttttacaacagcctgatgccgaacgtttaagcgaactgttcgccagcctgttgaatatgcagggtgaagaaaaatcccgcgcgctggcgattttaaaatcggccctcgatagccagcagggtgaaccgtggcaaacgattcgtttaatttctgaattttacccggaagacagcggtctgttctccccgctattgctgaatgtggtgaaattgaaccctggcgaagcgatgttcctgttcgctgaaacaccgcacgcttacctgcaaggcgtggcgctggaagtgatggcaaactccgataacgtgctgcgtgcgggtctgacgcctaaatacattgatattccggaactggttgccaatgtgaaattcgaagccaaaccggctaaccagttgttgacccagccggtgaaacaaggtgcagaactggacttcccgattccagtggatgattttgccttctcgctgcatgaccttagtgataaagaaaccaccattagccagcagagtgccgccattttgttctgcgtcgaaggcgatgcaacgttgtggaaaggttctcagcagttacagcttaaaccgggtgaatcagcgtttattgccgccaacgaatcaccggtgactgtcaaaggccacggccgtttagcgcgtgtttacaacaagctgtaagagcttactgaaaaaattaacatctcttgctaagcttattaaaggcttataacaccttcaggcggccagtccgcctgatttcattttatggataatcattatgaataaatcgctggtagcggtaggcgtcattgttgcgctaggcgtagtctggacaggcggcgcatggtatacaggcaagaagattgaaacccatctcgaagacatggtcgcgcaggcgaacgcgcaactcaaactgacagctcctgaatccaacctggaagtgagttatcaaaactatcatcgcggcgtattcagcagccagttgcaactgttggtgaaacccattgccgggaaagaaaatccgtggattaaaagcggtcagagcgtcatcttcaacgaatcggttgatcatggtcccttcccgcttgcccagcttaaaaaactgaacctgatcccgtcgatggcatcaattcaaaccacgctggttaataacgaagtaagcaaaccactgtttgatatggcaaaaggtgaaacgccttttgagattaactcgcgcattggttacagcggtgattccagttccgatatttcgctcaagccactgaattacgagcaaaaggatgaaaaagtcgcctttagcggcggcgagttccagttaaatgctgacagagacggcaaagccatctccctttccggggaggcgcaaagtggtcggatagacgcagttaacgaatacaaccagaaagtgcagttgacctttaataatctgaaaaccgacggttccagcacgctggcaagttttggtgagcgtgtaggaaatcaaaaactgtcactggaaaaaatgaccatttcagtggaaggcaaagaactggcactgctggaaggcatggagatcagcggtaaatcggatctggtcaatgacggtaaaacgatcaatagccaactggattactcgctaaacagcctgaaggtacagaatcaggatctgggcagcggcaagctgactttaaaagtcggccagattgatggtgaagcctggcatcagtttagccagcaatataacgcgcaaactcaggcgctgctggcacagccagaaattgccaacacccccgaactttatcaggagaaagtgacggaagccttctttagcgccctgccgctgatgctgaaaggcgatccggtgattactatcgcgccgctaagctggaaaaacagtcagggtgaaagtgccctgaatctgtcgctgttcctgaaagatccggcaacgactaaagaagcgccgcaaacgctggcgcaggaagtagatcgttcggttaaatctctggatgcgaaactgaccattccggtggatatggcaactgagtttatgactcaggtagcgaagctggaaggttatcaggaagatcaagcgaaaaaactggcgaaacagcaagttgaaggtgcatcagcaatggggcagatgttccgtctgaccaccttgcaggacaataccatcaccaccagcctgcaatatgctaacggtcagataacgttaaatgggcagaaaatgtcgttagaagattttgttggcatgtttgcgatgccagctcttaacgttccggctgtaccggcaattccgcagcagtaattcacggccaaaacgccggagaattttcactccggcgttttcatctgaaaacaaaccagagattgcctgatgcgctacgcttatcaggcctaccttttcctgcaacactttgaatttatgagtttttgtaggctggataaggcgtttacgccgcatccggcataaaaaacgcgcactttgtcaacaatctgaaacgccggagatttttctctccggcgttattttttacttcagcataaagtcatactgaatactcattttcacatcccagtaattcaggcgatcgcccagcgtactgccatcgcgcttttcccgccctttatcggcagcaagaaagaaattcatcccttgtaacggcccttcgctgacccgatagttcataccacctaagatacccgtgccttcaatccgcacatctcgtttactggattcatagccgcgagtcacaatcggtgcaaatgtcagcgtaaattgcggcgttaaacgatagttgacgcccaattgccaggactgcattccttcacggttacgatcaagacttaatgaaaagggatagccaatgtcggtatccaccacggcaccattcattgcatggcgcaaataaccaccactgccaaatacacttccccacggcgcattccaggtcaattgtccactaaccaacgccgtttcattgggctggctggtattacgacttaaaccttcgagctgcgcgtaaaagccgagcaactcccctttcaacgtataattcgggtcgagcggtatgcttttctcgagaatactttgtatctgattggaaacatctttctgtaccgatgcccccagagaatagcgactggtatcatcatgccaactggcggctaaaaaagaacgtgcgcgatgtttatcgtattttcccgtctggctgttatacaccccttcatcacgaataccggttgttgaatcagtccataaaaatactcgtgaacgccacattccccacagatcaatatttggtgttaaagcccaataacctaatgctccttcagaaactgtcggtaatgtacgttgcgaactgccagccattaacggaatacgataaggtaagctaccataactataatccgtcccgaagcgacctaatttaagcaggctattttcactgggttttatttttactgcccccagggcaaagccaaaacttttatcaccatcaagataccaccgggtactcatatcagcacgagcacctaatttataaacataatacgccccgccttcaacgccaataatattggaataataaccactattgaaatcgagcaatcctccctgtacccatgcgtaaatatctcttcccgcgccagcactgggcttatccgccctgcgcaattcgtttttcagtctgatgcgtagtcccgcttcatcgtcagccagttgcgccgcataagcagaggtaaggccagaggcagccgtcaggcaaataacggccatggccactatttttctcatagttgcacctttgatgttctgattatttttattgaatattaattagtgatatcgctgattaattgctgctgcacttttttacgattatcaatttcaaccacgatttctttgaattttttatccgtgagcggataaaaccagataataacgaatgccagtagcataaatccgcaaggtactaaggcaattgatgtgcggatgcccataataacttccggcgtttgcacctgattggcgatatatccgcttaaccccaaaataaaggcaggaattgaacctccgattgcctgaccgcatttacgggtaaatgagaatagtgaataggtgagcccttcaattcgcacgccggtcaggtattcaccgtattctacggtatcagcttccagcgcccacatcacggtcatggtaacgccctgaccaattgaagcgatggccaacgcaaccaacgccaccggcagtgaccagacggaaacccagaagaacagcagataaccgcaggttcccagcaaagcgccaatcaggaaggtattctttttaccgatcctcgcgaccatccccggcaccagcggtgccgatgccacagtaccaaccaggttttgcaccagtaccagcacagtgaacagcccggtatcatttaacacatagcgcacgtagaacaacgacgaggcgctgaccgcaaaggtcgaaatcagcacacacagcgcaccgatgcacaacataaacagcgggcgattccgtttcagggtttgcagactgatattcaatgacggctgcgcaacgatacgtaccacattctcacgcgtcgatttgaagcagatgaagtaaagcaccattccggcaatcgccagcacaattgtccagaaatggtataccgacaccatctcttccgggctggagttcttaatgctcggtcctatcagaaatgccaggcagacaaaggtcaatgaagcggcaatcccacgagccgcgcccagacgggcgcgggattgtggttgttgggtcatcgcggtagcaagtgaaccataaggaatattcaccaggctgtagcaaagcccgaggcccatgtaggtcaaatatgcatacaccactttgctaccatggctccagtcggtcggcacccagaataccagcacgctgaagatcattaacggcgcagtaccgaagagtaaaaacgggcggaattttccccagcgggtattcacactgtccaccactcgtccggcaaagacgtcggcgaaggcatcgaatacccgcaccagtaacagcatggtgcccgccgcagcggcaccgacgccagcgacgtcggtgtagtaactcaacaggaagagcgcccccattgcgaaggcgaagttattggcgacgtcaccgaggctgtagccgacgatggtgcgccaggagagttgttgattcattgtttgcctccctgctgcggtttttcaccgaagttcatgccagtccagcgtttttgcagcagaaaagccgccgacttcggtttgcggtcgcgagtgaagatccctttcttgttaccgccaacgcgcaatatgccttgcgaggtcgcaaaatcggcgaaattccatacctgttcaccgacgacggcgctgacgcgatcaaagacgcggtgatacatatccagccatgcacactgatactcttcactccacatgtcggtgtacattgagtgcagcccggctaacgtatccacgccgtattcggtgatgataatcggctgatgcagtttctcctgccaggccagaagttctttttccagtaccttctctgccgtttccaaatcgccgctttggacataccatccgtaataacggttcaggcacagcacatcaaagagatcgctgatggtatcggtgtgagcgtcgcagaacattacattgacgcaggtgatcggacgcgtcgggtcgagtttacgcgttgcttccgccagtggcgcgaaatattcccgtgcaccttgcggacgggtatccggttcgttggcaatactccacatcaccacgcttgggtggtttttgtcacgcgctatcagctctttaatcgcctgtaagtgcgcttgctgagtttccccgttgactgcctcttcgctgtacagttctttcggcttgttgcccgcttcgaaaccaatgcctaaagagaggttaaagccgacagcagcagtttcatcaatcaccacgatgccatgttcatctgcccagtcgagcatctcttcagcgtaagggtaatgcgaggtacggtaggagttggccccaatccagtccattaatgcgtggtcgtgcaccatcagcacgttatcgaatcctttgccacgcaagtccgcatcttcatgacgaccaaagccagtaaagtagaacggtttgtggttaatcaggaactgttcgcccttcactgccactgaccggatgccgacgcgaagcgggtagatatcacactctgtctggcttttggctgtgacgcacagttcatagagataaccttcacccggttgccagaggtgcggattcaccacttgcaaagtcccgctagtgccttgtccagttgcaaccacctgttgatccgcatcacgcagttcaacgctgacatcaccattggccaccacctgccagtcaacagacgcgtggttacagtcttgcgcgacatgcgtcaccacggtgatatcgtccacccaggtgttcggcgtggtgtagagcattacgctgcgatggatcccggcatagttaaagaaatcatggaagtaagactgctttttcttgccgttttcgtcggtaatcaccattcccggcgggatagtctgccagttcagttcgttgttcacacaaacggtgatacgtacacttttcccggcaataacatacggcgtgacatcggcttcaaatggcgtatagccgccctgatgctccatcacttcctgattattgacccacactttgccgtaatgagtgaccgcatcgaaacgcagcacgatacgctggcctgcccaacctttcggtataaagacttcgcgctgataccagacgttgcccgcataattacgaatatctgcatcggcgaactgatcgttaaaactgcctggcacagcaattgcccggctttcttgtaacgcgctttcccaccaacgctgatcaattccacagttttcgcgatccagactgaatgcccacaggccgtcgagttttttgatttcacgggttggggtttctacaggacgtaacataagggactcctcattaagataataatactggtcaacctttaatctgattagttaaccaattctgtgttgcacacagttatctgtgagaaacccatggaagagaaatggaaataaaaagaactgacaccgcgatcaaaaaaccaaaaactgcaatacccacagcgtgatatagatcgcattaatctttaaaacagcgttgacagaagccataaaataagcaaccgaacgttcgctcgagcgtattgggaacgataaactctcatgacatatggctacagtgaatattttggggggaattctccgaagccgggaaggataatttttgcacagagaaattacgatatgaaacgcgggcacagttatcaccagcccgccgaaaaagagagagaatcaggatgcggttaagataccgccaatcatcgcgcgtaatccctgagcaaacgacgcttcacgcgccaggtcttccgcttcgatatcggccagtacaccgtaggtcagatccagcagtaaacgtgaagtcattgccgtgttgatgtctgggcttatctcgcctttttgctgggcatcacgcatccgctgggcaacaaattccgtgatcgtcatatgcttatttttaagcatggcggcgacctgtgggttacgcatcccttccgccataatttcaaccaccagcgcccgttgtccaaaggcttcatgggtgagagagacaatggactcgaccatatagtcaacgaaatgaatcccttcaatcggttcccggaaacgggccagcgccctctcctggtcctgtaagataatcgcctgaatcaaggcttctttggagatgaaatggtgatagagcgtcccgggactaatggcgcaagatttacagatggctttcatcgaggcactgtgaaatccattttctgaaaaaatctctctggcagcattgaggatccgggtccgtgtcggttgtgcttcagtctgcatgttatccatcattaaaccattatagttagcgtgaataactagtttaccgcgttgtcaggtgagcgcctatcattgctgttgaatagtgcgaaggcacactctattcgtatacttttcactctgaaattggttaaccaatagccgtgatttggctgccagttatttagcagagacgttgatgagtttatcccggtaaacaacacgcacggttgtttaccggtccgttagtgtattaattgagctcctgtaccccaccaccggagacggtgagaatttgtccgcttacccagctcgcagcaggcgagcaaaggaacagcgctgcgttagcaatatcttgcggttggcccagacgtctgatcggcgtgtgctgtaacattttttgttcaatttctggtgtaataacggatttcagggcatcggttaatattgcccccggcgcaatgccatttacccgaatatttttttcacccaggtcaaacgccatatttctgaccagatgactggccgcagctttagatgatgcataggaagtcatgtttatatttttattttctgccgccatagaagtgatggtcagaataacgccaccgccatttttttccatttctggcgcaacaagttgtgacagatggaaaaaagaaaacacattcagttcataagcacggcgaaaatccgccattggcatatcaaacggtttaggtccaccgccaccggcgttgttaaccagaatatcaactttacccagcttactgatagcaaagtctgccagtgcagagagttcctgttcggaagtaatatcacaacggcaggcaaatgcctgaccacccagttgttgaatttcgtctacaacatggttagctgcgtcggcgttaatatcactgaccaccacagatgcgccagctgtcgcgaatgtaatggcgatttctttaccaatacctgcacccgcacctgtgatgatggcgcattttccgtcgagtctcaggttgtcagaattaaacacataaacctcctgtgaacttcagtaaaaataaaaggcaccgcctgtgtgccacattttttatcattaaccttgaggaaaggacactaccaggtatagcagataaagagaggattatttcgctgcaatgagccgggcgggaataataagattgcgtgaatgcgtctcttcatgggtgattttttgcatcatgcgatccgcaagtgtgataccaagttcccgcgctggcgtgctggcccaggtaacaggtatatcatcaagtgtggttggtgtcgcatcggtaaatgccgccagcgaaacctgttgctcaaagtaacgatcgactccgctttccccgctttgccgccctgctttgagcaaaccaaaccatgcccccatcgcaatagtttcgttatagcaaaccacggcactgatggtcgggttatgacgtaaaagcgccgtgatagcttccgcggcttgcttctggctggaagtgcactccaacacccaatcgctatgaaacggcaggccaaattttagtagagttgcacaatagcccccaacccgttctgcacgggttaatgaggaactttgccctcccagccaggcgatccgctgatgcccattgcgaatgagatgctccgtcaacaactgtgcagcctgcatgttgtccgggcgaaccgtatcaacatcatcaagataactggcacgggaagcgaaaatcaccgggatagctttttcttctgccatccgtcgcaggtcatcgctacttcctgcagctccggcaattaccacaccatcgacaccctgattcagtaacagtgaaaaccgctgtgccagctgctcaccgtctttaccgccgtgaagcaaaaaaaccatccgtccctgcgcttccagagcttccgtcaatccggccgtcaattcggcgtaaaacggcgcagataaatcacggacgatcaaaccaatgacgccgctttgcccgccgcgcagcgccgacgcctggcgattgcgcacaaatcccagctcttcaatggcggcgttaacgcgttctcctgtggcggtagagattcgccctttgccactaagcaccagcgaaacggtacttaccgacacgcccgcagccagcgcaacatcatgaatggttatttttttggcggtagccatgcagatgacctactccctgattatgtgacagataaaacgttttaccttttatttatcttatacccgctattatcgttgcgtaatgtgatttatgcctcactaaaatttgataaaacgttttatcttctcgcgcaatttactgaatccagattgttctctacgaggagtcgttttatgacggcgaaaacagcaccgaaagtcacgctgtgggagttcttccagcagttaggcaaaaccttcatgttacccgtggcattattgtcgttctgcggcattatgctcggcattggtagttctcttagcagccatgatgtcataaccctgatcccggtcctgggcaaccccgtgttgcaggctatctttacctggatgagtaagattggctcgtttgcttttagtttcctgcctgtcatgttctgtatcgccatcccgctgggcctggcacgcgaaaataaaggcgtagcggcattcgctggcttcatcggttatgcggtaatgaacctcgcggtaaacttctggttgaccaataaaggcattctgccaaccacggatgccgcggttctgaaagccaataacatccagagcattcttgggatccagtcgatcgataccgggatcctcggtgcggtgatcgccggtattatcgtctggatgctgcatgagcgtttccataatatccgcctgccggatgcgctggcattcttcggcggtacgcgcttcgtaccaattatctcctcgctggtgatgggccttgtcggcctggtgattccattagtctggccgattttcgccatgggtattagcggcttgggccatatgataaacagcgcgggtgatttcggaccgatgctgtttggtaccggtgaacgtctgctgttgccgtttggtctgcatcacattctggtggcattaattcgctttaccgacgcaggcggcacgcaggaagtctgcggtcaaaccgtcagcggcgcactgaccatcttccaggcgcaattgagttgcccgaccactcacggtttttctgaaagcgccacgcgtttcctttcgcaaggtaaaatgcctgcgtttctcggcggtctgccaggtgcagcgttagctatgtatcactgcgcgcgcccggaaaatcgccataaaattaaaggtctgctgatttctggcctgatcgcctgcgtcgttggcggcactaccgaaccgctggaattcctgttcctgttcgtagcgccagttctgtatgtcatccacgcgctgttaaccggcctcggcttcaccgtcatgtctgtgctcggcgtcaccatcggtaataccgacggcaatatcatcgacttcgtggtgttcggtattttgcatggtctgtcaaccaagtggtacatggtgccagtggtggcggcaatctggtttgtcgtttactacgtcatcttccgtttcgctatcacccgcttcaatctgaaaaccccggggcgcgatagcgaagttgccagctcaatcgaaaaagccgttgccggtgcgccgggtaaatcaggttacaacgttcctgcaatcctcgaagcattaggcggtgccgacaatattgtcagcctcgataactgcattacccgtctgcgtttgtctgtgaaagatatgtcgcttgttaatgtgcaggcactgaaggacaatcgggcaattggcgtagtacaacttaatcaacataacctgcaggttgttatcgggccacaagttcagtcagtaaaagatgaaatggccggtctgatgcatactgtccaggcataaggataagatatgttcgatttttcaaaggtcgtggatcgtcatggcacatggtgtacacagtgggattatgtcgctgaccgtttcggcactgctgacctgttaccgttcacgatttcagacatggattttgccactgccccctgcattatcgaggcgctgaatcagcgcctgatgcacggcgtatttggctacagccgctggaaaaacgatgagtttctcgcggctattgcccactggttttccacccagcattacaccgccatcgattctcagacggtggtgtatggcccttctgtcatctatatggtttcagaactgattcgtcagtggtctgaaacaggtgaaggcgtggtgatccacacacccgcctatgacgcattttacaaggccattgaaggtaaccagcgcacagtaatgcccgttgctttagagaagcaggctgatggttggttttgcgatatgggcaagttggaagccgtgttggcgaaaccagaatgtaaaattatgctcctgtgtagcccacagaatcctaccgggaaagtgtggacgtgcgatgagctggagatcatggctgacctgtgcgagcgtcatggtgtgcgggttatttccgatgaaatccatatggatatggtttggggcgagcagccgcatattccctggagtaatgtggctcgcggagactgggcgttgctaacgtcgggctcgaaaagtttcaatattcccgccctgaccggtgcttacgggattatagaaaatagcagtagccgcgatgcctatttatcggcactgaaaggccgtgatgggctttcttccccttcggtactggcgttaactgcccatatcgccgcctatcagcaaggcgcgccgtggctggatgccttacgcatctatctgaaagataacctgacgtatatcgcagataaaatgaacgccgcgtttcctgaactcaactggcagatcccacaatccacttatctggcatggcttgatttacgtccgttgaatattgacgacaacgcgttgcaaaaagcacttatcgaacaagaaaaagtcgcgatcatgccggggtatacctacggtgaagaaggtcgtggttttgtccgtctcaatgccggctgcccacgttcgaaactggaaaaaggtgtggctggattaattaacgccatccgcgctgttcgttaaccccaattgcgcaacgtaaaaaatcgttgcgcaatcgtggatttttaccctgctttgtttttataatggtgcgcacttttatatccagaaaaagagtgcgaccatgattgataccaccctgccattaactgatatccatcgccaccttgatggcaacattcgtccccagaccattcttgaacttggccgccagtataatatctcgcttcctgcacaatccctggaaacactgattccccacgttcaggtcattgccaacgaacccgatctggtgagctttctgaccaaacttgactggggcgttaaagttctcgcctctcttgatgcctgtcgccgcgtggcatttgaaaacattgaagatgcagcccgtcacggcctgcactatgtcgagctgcgtttttcaccaggctacatggcaatggcacatcagctgcctgtagcgggtgttgtcgaagcggtgatcgatggcgtacgtgaaggttgccgcacctttggtgtgcaggcgaagcttatcggcattatgagccggaccttcggcgaagccgcctgtcagcaagagctggaggcctttttagcccaccgtgaccagattaccgcacttgatttagccggtgatgaacttggtttcccgggaagtctgttcctttctcacttcaaccgcgcgcgtgatgcgggctggcatattaccgtccatgcaggcgaagctgccgggccggaaagcatctggcaggcgattcgtgaactgggtgcggagcgtattggacatggcgtaaaagccattgaagatcgggcgctgatggattttctcgccgagcaacaaattggtattgaatcctgtctgacctccaatattcagaccagcaccgtagcagagctggctgcacatccgctgaaaacgttccttgagcatggcattcgtgccagcattaacactgacgatcccggcgtacagggagtggatatcattcacgaatataccgttgccgcgccagctgctgggttatcccgcgagcaaatccgccaggcacagattaatggtctggaaatggctttcctcagcgctgaggaaaaacgcgcactgcgagaaaaagtcgccgcgaagtaacaaaatggatggtgcaaatgcaccatccatttttcatgcaaggcacaaagtcgcgcgatgtttggcggattcgatgcccagctcaatcaactccattacctggattgcctggcttgccggaaccggattttcaccatcgccatttaacgcatcacgaatagccgcatagtaagccggataattcccaggcaccgtcaacagcgtttcttcgacacgttcctcaccttccacgcgggtaagtacgccatcacgcatatcgtagccccagtcttcctgcggtagacgctcgccatttttcagacgttcttcctgtggatcgaggccatatttcacataactgcctcgggatccatgcacgatataccgtgctgactcagcggctgccagcatggtaccgtgtaaaatgactcgccgctgtggataggacaagatggcgtggaaataatcggtcgactgcgctccgggccgtaactgtgccaaatctaccgtcatgctgaccggtaaaccaaaaagcgtaatggcctgatcaagaagatgtggtgctaaatcgtaccagataccgctgcctgggccgccctgttcacgccaacgatcgcgcacctgcggacggaagcggtcaaaatgagactcaaagtaagcaacttcacccagcacgccttccgcgagtaaaccttttagcgtcaagaaatcgctatcccagcgacggttatggaatacagacagcacacgccccaggctttttgccagcgcatccagctctcgcgcttgtgacagtgtcacggtaaagggtttatcaacgaccacatgtttacccgcctcaagcgccgctttggctaacggtaaatgggtatcgttgggtgtaggaatgacaatcaggtctatgttgggatcgttaaacagatgcttcggctcagagacaaccgtaaccgttggccagtcggcttttacttttgtttcatcactgctggagattaccgccagttccagcccgggcgtgcccgcaatcaggggcgcatggaaggttttgctcgcataaccatacccaatcaacccaacacggatgttgtcgctcatgtcattgcctctcattgaagtatgatggctatttgacactatcctttacccacgctcaacagtttaataacctgccagcaataagggatgttgtttaacttaagtcaaaaaaatagcgaattttccaacgacaaaagctaaatatcgcaaaaacctcagtaaaaatcttgctggagctattattgctaagtaacatttaccccctgaagttaatggatcaatcaagagagatgtgggctgtaatgaatcgtcttattgaattaacaggttggatcgttcttgtcgtttcagtcattcttcttggcgtggcgagtcacattgacaactatcagccacctgaacagagtgcttcggtacaacacaagtaagctctgcacttgtggagcgacatgctgcccgtccgggtgcatgttttcacttgtcggatattaaaccaggaatttattatcttgttcgatgttgttggtgattgtcagggatagtaaagcgcgttactcttttcagagcagtttttcatccctgaatatttgccatcagcgcattcttattattgtaataacacaagcgttcacttttggtgaaattttatcatcactaataatacctacccctttggtattgattattttatggaccttttatgactgttcaggactacttattaaaatttcgcaaaatcagttcactcgaaagtctggaaaaactctacgaccatcttaattacaccctgacggacgatcaggaactgatcaatatgtatcgtgctgccgatcaccgtcgcgcagagctggtttctggcgggcgtttgtttgacctcggccaggtaccgaagtccgtctggcactatgtccaataaagaaagtagcgatcggttataaaagccttataataacgcccctaaaattagatttgcctgtttgcgtcgctattctggagaacctatgaccaccacaacgccacaacgtattggaggctggttgcttggcccgttggcctggcttttagtcgctctgttgagtacgacgctggcgttgttgctgtataccgctgcgttatcttctccgcaaacatttcaaacgctcggcggacaagcactgacgacacaaatcttatggggcgtttcttttattaccgctatcgccttgtggtattacacactgtggttgaccatcgctttctttaaacgtcggcgttgtgttcctaaacactatattatctggctgcttatttccgtattgctggcagtaaaagcattcgctttttcacccgtggaagatggcatagccgttcgccagttgctgtttactttgttggcaaccgcattgatcgtcccctatttcaaacgctcgtcgcgggtaaaagcgacgtttgtgaatccgtaataaccttacagttaacctgttgtcgcctgctctggattaacggataataggcggcttttttatttcaggccgaaaaatgactgactacctgttactgtttgtcggaactgtactggtcaataactttgtactggtcaagtttctcggtctctgtccgtttatgggggtttccaaaaaactggaaaccgcgatgggcatggggctggcaacaacgtttgtgatgacgctggcgtctatttgcgcctggcttatcgatacgtggattttgatcccacttaatctgatttacctgcgcaccctggcatttattctggtgattgctgtggtcgtgcagttcaccgagatggtggtgcgcaaaaccagcccggtgctttaccgtctgctggggatttttttgccgcttatcaccaccaactgtgcagtgctcggcgtggcgttgctgaatatcaatctcgggcacaatttcttgcagtcggcgctgtacggtttttccgccgctgtcggtttctcgctggtgatggtgctcttcgccgccatccgcgaacgccttgctgtggctgatgtcccggcaccttttcgcggtaatgccattgcgttaattaccgcaggtcttatgtctctggcctttatgggctttagtggtttggtgaagttgtaatgaatgctatctggattgccgttgccgccgtgagcctgctgggcctggcgtttggcgccattctgggttatgcctcccgccgttttgcggtggaagacgatccggtcgttgagaaaattgacgaaatcttaccgcagagccagtgtggtcagtgcggttatcccggctgtcgcccctacgcggaagccatcagctgtaacggtgaaaaaatcaaccgttgcgccccaggtggcgaagctgtgatgctaaaaattgccgagttgcttaatgtcgagccgcagccgctggatggcgaagcgcaagagataacgcctgcgcggatggtggcggttattgatgaaaataactgtattggctgcactaaatgtattcaggcgtgtccggtagacgccatcgttggcgctacccgtgccatgcatacggtaatgagtgatctctgtacgggctgcaatttatgtgttgatccgtgcccgacgcactgcatctcgttgcaaccggtcgcagaaacacctgactcctggaaatgggatctgaacaccattcccgtgcgtatcattcccgtggaacaccatgcttaagttattctctgcattcagaaaaaataaaatctgggatttcaacggcggcatccatccaccggagatgaaaacccagtccaacggtacacccctgcgccaggtacccctggcgcagcgttttgttattccactgaaacagcatattggcgctgaaggtgagttgtgcgttagcgtcggcgataaagtattgcgcggccagccgcttacccgtggtcgcggcaaaatgctgcctgttcacgcgcccacctcgggtaccgttacggctattgcgccccactctacggctcatccttcagctttagctgaattaagcgtgattattgatgccgatggtgaagactgctggatcccgcgcgacggctgggccgattatcgcactcgcagtcgcgaagagttaatcgagcgcatacatcagtttggtgttgccgggctgggcggtgcaggattcccgacaggcgttaaattgcagggtggcggagataagattgaaacgttgattatcaacgcggctgagtgcgagccgtacattaccgccgatgaccgtttgatgcaggattgcgcggctcaggtcgtagagggtattcgcattcttgcgcatattctgcagccacgcgaaattcttatcggcattgaagataacaaaccgcaggcgatttccatgctgcgcgcggtgctggcggactctaacgatatttctctgcgggtgattccaaccaaatatccttctggcggtgctaaacaattaacctacattctgaccgggaagcaggttccacatggcgggcgttcatccgatatcggcgtattaatgcaaaacgtcggcactgcttatgcagtgaaacgtgccgttattgatggcgagccgattaccgagcgtgttgtaaccctgactggcgaagcaatcgctcgcccgggcaacgtctgggcacggctggggacgccagtgcgtcatttattgaatgatgccggattctgcccctctgccgatcaaatggtgattatgggtggcccgctaatgggctttaccttgccatggctggatgtcccggtcgtaaagattaccaactgtctgttggctccctctgccaatgaacttggcgaaccacaggaagaacaaagctgcatccggtgtagcgcctgtgctgacgcctgccctgcggatcttttgccgcaacagttgtactggttcagcaaaggtcagcaacacgataaagctaccacgcataacattgctgattgcattgaatgtggggcttgcgcgtgggtttgcccgagcaatattcccctggtgcaatatttccgtcaggaaaaagctgaaattgcggctattcgtcaggaagaaaagcgcgccgcagaagccaaagcgcgtttcgaagcgcgccaggctcgtctggagcgcgaaaaagcggctcgccttgaacgacataagagcgcagccgttcaacctgcagccaaagataaagatgcgattgctgccgctctggcgcgggtgaaagagaaacaggcccaggctacacagcctattgtgattaaagcgggcgaacgcccggataacagtgcaattattgcagcacgggaagcccgtaaagcgcaagccagagcgaaacaggcagaactgcagcaaactaacgacgcagcaaccgttgctgatccacgtaaaactgccgttgaagcagctatcgcccgcgccaaagcgcgcaagctggaacagcaacaggctaatgcggaaccagaacaacaggtcgatccgcgcaaagccgccgtcgaagccgctattgcccgtgccaaagcacgcaagctggaacagcaacaggctaatgccgagccagaacaacaggtcgatccgcgcaaagccgccgtcgaagccgctattgcccgagccaaagcgcgcaaacgggaacagcaaccggctaatgcggagccagaagaacaggttgatccgcgcaaagctgccgtcgaagcggctattgcacgcgccaaagcacgcaagctggaacagcaacaggctaatgcggtaccagaagaacaggttgatccgcgcaaagcggcagttgccgcggctattgcccgcgctcaggccaaaaaagccgcccagcagaaggttgtaaacgaggactaaatggtattcagaatagctagctccccttatacccataaccagcgccagacatcgcgcattatgctgttggtgttgctcgcagccgtgccaggaatcgcagcgcaactgtggttttttggttggggtactctcgttcagatcctgttggcatcggttagtgctctgttagccgaagctctcgtactcaaactacgcaagcagtcggtagccgcaacgttgaaagataactcagcattgctgacaggcttattgctggcggtaagtattccccccctcgcgccatggtggatggtcgtgctgggtacggtgtttgcggtgatcatcgctaaacagttgtatggcggtctgggacaaaacccgtttaatccggcaatgattggttatgtggtcttactgatctccttccccgtgcagatgaccagctggttaccgccacatgaaattgcggtcaacatccctggttttatcgacgccatccaggttatttttagcggtcataccgccagtggtggtgatatgaacacactacgcttaggtattgatggcattagtcaggcgacaccgctggatacatttaaaacctctgtccgtgccggtcattcggttgaacagattatgcaatatccgatctacagcggtattctggcgggcgctggttggcaatgggtaaatctcgcctggctggctggcggcgtatggttgctatggcagaaagcgattcgctggcatattcccctcagcttcttagtaacgctggcgttatgcgcaatgttgggctggttgttctcaccagaaacactggcagcaccgcaaattcatctgctgtctggagcgaccatgctcggcgcattctttattttgactgacccggttaccgcttctacgaccaatcgtggtcgtcttattttcggcgcgcttgcgggcttattagtctggttgatccgcagtttcggcggctatcctgacggcgtggcttttgccgtcctgctggcgaacatcacggttcctctgatcgattactacacgcgtccgcgcgtctacggccatcgcaaagggtaaaccatgctgaaaactatccgaaaacacggcattacgttggcgctatttgcagcgggttcaacagggttaactgcggccatcaaccagatgaccaaaacgacgattgctgaacaggcctgtctgcaacaaaaggcgttatttgatcaggtgctgccagccgaacgctataacaatgcgctggcacagagttgctatctggtaactgcgccagagttaggtaaaggtgagcatcgggtttacatcgccaaacaggatgacaaaccggtagccgccgttctggaagcaaccgcgccagatggctattccggtgcgattcagctgctggtgggagccgattttaacggcacggtacttggcacgcgcgtgacagagcaccacgaaacgccagggcttggcgataaaatcgaactgcgcctttctgactggatcacccattttgcgggtaaaaaaatcagtggtgcagatgatgcgcactgggcggtgaagaaagatggtggtgatttcgaccagttcaccggcgcgacgattactccccgcgcggtggttaatgcggaaaaacgcgccggattgtacgctcagacgttaccggcacaactttctcaacttcctgcctgtggagaataaagcgtgagcgaaattaaagacgttattgttcaggggttgtggaaaaacaactctgcgctggtccagttgctcggcctttgtcctctgttggcggtcacgtccactgccactaacgctctgggtttaggacttgcgactacgctggtactgacgctgaccaacctgaccatttcgacgctgcgtcactggacgccagccgagatccgcattcccatttacgtgatgatcatcgcctcggtggtcagcgctgtacagatgctgatcaacgcctacgcctttggcctgtatcaatcattagggatttttattccgctgattgtcactaactgtatcgttgtgggccgcgctgaagccttcgccgccaaaaaaggtccggcgctttcggcactggacggcttttcaattggtatgggcgcaacctgcgccatgttcgtgctgggttcactacgcgaaattatcggcaatggcacattgtttgacggtgcagatgcgctgttaggtagctgggcaaaagtattacgcgtggagattttccacaccgactcccctttcctgctggcgatgctgccaccaggtgcatttattggcctgggactgatgctggcaggaaaatacctgattgatgaaagaatgaaaaagcgccgtgctgaagcagctgcagaacgtgcattgccaaacggtgaaacagggaatgtctgatgaataaagcaaaacgcctggagatcctcactcgcctgcgtgagaacaatcctcatcccaccaccgagcttaatttcagttcgccttttgaattgctgattgccgtactgctttccgctcaggcgaccgatgtcagtgttaataaggcgacggcgaaactctacccggtggcgaatacgcctgcagcgatgcttgaactgggcgttgaaggggtgaaaacctatatcaaaacgattgggctttataacagcaaagcagaaaatatcatcaaaacctgccgtatcttgctggagcagcataatggcgaggttccggaagatcgtgctgcgcttgaagccctgcccggcgtaggtcgtaaaacagccaacgtcgtattaaacactgcattcggctggccgactattgctgtcgacacgcacattttccgcgtttgtaatcgtactcaatttgcgccggggaaaaacgtcgaacaggtagaagaaaagctactgaaagtggttccagcagagtttaaagtcgactgccaccattggttgatcctgcacgggcgttatacctgcattgcccgcaagccccgctgtggctcttgtattattgaagatctttgtgaatacaaagagaaagttgacatctgaagaaaaggggtaacaccgattaccccattgataacctttctttatcctcttttaaaacatctttttaacgtcaatgatgccattgcttagcgttatcatcaggtaatccgtttgcggataaccaaaaatgcaggttaattgtttttttaatagcgaaattttctattcattcgtgatcaagatcacgatgctgtcgcaatgtaaaaacattgcaagaatcaggttaaaatcatttaaatttacacacgcaacaaatattgacctacaaaacattacactggctatttttcagaaactggactatctcactagtaaaaacgctaaatagcagaacatatcgccgttaagccatcacccccctctcagtgcagtgaaaaaatctgccgttacgttttttgaaaaatttaacgctggataacatttcccggaatggttgaattccccgcctcagttatatgtaacagattattacaaaggacttgtctgaaagtgcaagatagtgaacattacctgccgtttcccctcccactataacaattgcgcgtatgttttttatacataacgcgagaaagcacccccgttaatatgggatgtaaaaaaagaggtaaaagtgtccactgcaaaccaaaaaccaactgaaagcgtcagtttgaacgctttcaaacaaccgaaggcgttctatctcatcttctcgattgagttatgggaacgttttggttattacggcctacaaggaattatggctgtttacctggttaaacaactgggtatgtctgaagcggattcaatcacccttttctcttcctttagtgccctggtttatggtctggtcgctatcggcggctggttaggtgacaaggtactgggtactaaacgcgtaattatgctcggcgctattgtgctggcgattggttatgctctggttgcctggtctggtcacgacgccggtatcgtttatatgggtatggcggctattgcggtcggtaacggcctgtttaaagctaacccgtcttctctgctttctacatgctatgagaaaaacgacccgcgtctggacggtgcattcaccatgtactacatgtccgtcaacatcggctctttcttctctatgattgctacgccgtggctggccgcgaaatacggctggagtgttgcgtttgcgttgagcgttgtaggcctgctgatcactatcgttaacttcgccttctgccaacgctgggttaaacagtacggttcaaaaccagacttcgagcctatcaactaccgtaacctgctgctgaccattattggtgttgtggcactgatcgctatcgccacctggctgctgcacaatcaggaagttgcgcgtatggcgctgggcgttgttgccttcggtatcgtggttatcttcggtaaagaagccttcgcgatgaaaggtgctgcgcgtcgtaaaatgatcgttgccttcatcctgatgctcgaagccattatcttcttcgtgctgtacagccagatgccaacgtcactgaacttctttgcgattcgtaacgttgagcactccattctgggtctggccgtagaacctgagcagtatcaggcactgaacccgttctggatcatcatcggtagtccgattctggccgctatctataacaagatgggcgataccctgccgatgccaaccaagtttgcaatcggcatggtgatgtgttctggtgcgttcctgattctgccgctgggtgcgaaattcgcgtctgacgctggtatcgtgtctgtaagctggctggtcgcaagctatggcctgcagagcatcggggaactgatgatctctggtctgggtctggcaatggttgctcaactcgttccgcagcgtctgatgggcttcattatgggtagctggttcctgaccactgccggtgcaaacctgattggtggttatgttgcgggtatgatggctgtgccggataacgttaccgatccgctgatgtcactggaagtctatggtcgcgtattcttgcagattggtgtcgctactgccgttattgcagtactgatgctgctgaccgcgccgaaactgcaccgcatgacgcaggatgacgctgcagacaaagcggcgaaagcagccgtagcgtaaaattcagggaaactcttttacaagccgctaacttttcgttagcggctttttttttgttcagcaacgcactaccatactttaaaccacagacaaaaggagttaccgatgaaattgttctacaaaccgggtgcctgctctctcgcttcccatatcaccctgcgtgagagcggaaaggattttaccctcgtcagtgtggatttaatgaaaaaacgtctcgaaaacggtgacgattactttgccgttaaccctaaggggcaggtgcctgcattgctgctggatgacggtactttgctgacggaaggcgtagcgattatgcagtatcttgccgacagcgtccccgaccgccagttgctggcaccggtaaacagtatttcccgctataaaaccatcgaatggctgaattacatcgccaccgagctgcataaaggtttcacacctctgtttcgccctgatacaccggaagagtacaaaccgacagttcgcgcgcagctggagaagaagctgcaatatgtgaacgaggcactgaaggatgagcactggatctgcgggcaaagatttacaattgctgatgcctatctgtttacggttctgcgctgggcatacgcggtgaaactgaatctggaagggttagagcacattgcagcatttatgcaacgtatggctgaacgtccggaagtacaagacgcgctgtcagcggaaggcttaaagtaatagccatcggcccacaggtcgttgtgggccgaaatgagatatttcagagctttgttgcgctgaagtaatgttctggtttggcaatacgatcctgagcagccaccacttgcagctcatattcctgcattgctttggtggtcaccatgatttcgtagactgcagcggtcacatgttccagcgcctcctgcagcgttgccccctgaagcagtttcaccagcagtaaaccgctcgtcacatcaccaacacctaccggctggcgcataccaaaatccaccagcggacggctgatatgccaggcttcatcggcggtgaccagcagcatttcaaaacggtcacggctgtagccagctcgcgccaggtgtttaaccaacacaatttgtggcccttgcgcaatgagttcgcgcgctgccagaaccgcttcttcgacgttatttaccgcatgctcacagagtatttccagctcaaccagatttggcgcaatgatatcgctggcaggcaaaccgtgccgcacatgaaactctgcgacacccggtgcaacgatacagcctttttccggatgacccattaccggatcgcaaaaatatttcgcctgcggattcgcggctttcacctgacggacgataccgaggatatgttcaccctgctccgccgatcccagatagccacttaatacggcatcacaggtgtgtaatttatcaatggcggcaatgccttgcacaatttcggttaaatggctgggcggcatcacgcagccagtccatttgccgtattgggtgtgattagaaaattgaacggtgttcagcggccagacgttcgcgcccaggcggcgcatcggaaactctgccgcactgttacccgcatgaccataaacaacgtgagactggatagcgagaatatttttcatcatgttccctgtataaaaaccagggggagtgatttctcactccccctttccacttaatgcattatttccagcaaatcagacagtaattctttttaccgcgacgcagtaaggtaaaacgaccaaacagacgatcttcttctttaaagaagtattcaggatcggactgtttttcaccgttaatggtgatggcattggaggcgatagttttacgtgcctgaccacgggaaggttgcagttcagaatcgaccagtgcctgcatcaggtctgcgcccttttccatctcaaccatcggtacgccgtcctgcgccagctgttcgaagtccgcttcactcagcgcactcaaagaaccgctgaacaggcattcggtaatacgttttgccgcctgtaaaccttcttcaccgtgaaccagacgagtcacctgctccgccagtacatactgggcgcgcggtgctttaccgctgtttttatcttcttcttccagggcgttgatctcttcaatgctcataaaggtgaagaacttcaggaagcggtaaacgtcggcatccgcagtgttgatccagaactggtagaatttgtacgggctggttttcttcggatccaaccagactgcgccgccttcagttttaccaaatttggtgccatctgctttagtgatcagcggaacggtcaggccaaacacctgattctgatgcagacgacgggtcaggtcgataccagaagtgatgttaccccactggtcagaaccaccaatttgcagcaccacaccgtactgtttgttcagacaggcgaagtcataaccctgcaacaggttgtaggaaaactcagtgaacgaaatcccctgatcttcacggttgagacgctgcttaaccgcttctttgttgatcatctggttaacggagaagtgtttgccaatatcgcgcaggaaggtcagcacattcatattgccgaaccagtcatagttgttcgccgcgatagcagagttttctccacagtcgaaatcgaggaacggggcaacctgcttacggattttgtccacccactcctgaacagtttcttcggtgttcagcttacgctcggcagctttgaagctcgggtcgccaatcagacccgtcgcgccgcctaccagcgcaaccggcttgtggcccgcctgctggaagcgtttcaggcataacaatggaacaagatgccccaaatgcaagctgtcagcggtaggatcgaagccgcaatagagcgcgatcgggccttgcgccagtcgctctgctaacgcttcctcgtccgtcacctgggctaccagcccccgctcttgcaattgtttaatcaagttactgcttgccatcaaaatctccatgtatataacgactgcacctttgccggtacacgacttttcgccagatgcgaaagagacatagaataaagtgccagaatcaggagtaccagcgattaaagcaagatttttgcatcttttcagggtgcaagacgatcaatcttccacgcatcattttcacgctggtacaaaaagcggtcatgcaggcgatgctcaccaccctgccagaactcaatctgttcaaggctgacgcgaaaaccgccccaaaagctcggcaatggcacttcgccctgttgaaacttctgcttcagctccaggaatttactttcaaggataccgcgggcagaaatgcgactggactgcttcgaaacccatgcaccaatctggctatcacgcgggcggctatgaaaatatttcatcacttcgagagtcgaaagtcgttctgctttaccgatcaccatcacctggcgctcaagggtatgccacgggaacagcaggctaacgcgcggattattttcgatttgatgtgctttacggctgccgaggttggtgtaaaacaccatgcctttttcgtcgtaatgtttgagtaaaacgatgcgctgataaggctgaccatgttcatccacggtagcgaccaccatcgcggtagggtccgccagtttggcttcacaagcctgagagagccaacgttcaaaaagggttaatggatcggcgggaagatcgcggcggcgtaacccgcctttggtgtattcacggcgcagatgcgcgatttgctgcaattcgtcgttatcagacatggttttctttacggattgtcagtgggtgacgctattgtgcgccgcccctggaaaaatctcaacgctgtggattttgtaactgacagttattcaagacgatgcggtcacgtttatagacagtcgcttcatcgcctttcgaccagaaaacatagattccgtcagtgtaacgcgcgccagaggctgaaatgccctgtttgagatgcagtagttgattatcgtaaacaaaactgacctcctggcgcggattattcagtttgaccgtcaacggtttttcatcacactggtattccagcgtatcggtttgcatgcgctcaaccagctgattaaaggcgctacagccggagagaaggaccggcaaaatgataattaacagttttttcatagtcatatcccgaagactttcctggtctggagggcaatacgccctccctaacgttccaagtgtaacggcagacgcggtaagaaaaattcagttaactctgatatcacgggttagcggggaaaatagcccccagtaccgtctcctggcttgcgccagtgacggaaggcagatttcctggtaatcccgccagcgtccgccaggcaagccaggcgaaagccaatgcttccatgtcatcgccactaatgccaacggcatcggtggtggtgacttctgtgcctggcagtaatgccgccagacgcgccatgagtagcggattacgactacctccaccacataccatcaatcgttcgcagccaccgctcaacaaaacttgttcagaaatggtcacggcggtgagttctgccagtgtcgcctgcacatctcggggatcaacacccggaaaatggcgcaaatggcgctccagccaaccatagttaaagtattcgcgtccggtgcttttcggtgcaggttgcgagaaatacgggtcgctgagcatattttgcagcagtgggagaataactttacccgcccgtgcccactcggcatctttatcgtaaggtttaccggcctgacgccagatccaggcatccatcagcatgttaccaggaccggtatcgtagcccccaaccggctgcccaggaatgagcagtgacagattggcgatgccgccaatattgagcaccattcgtcgctcggttgggtgagccagcagcgcatgatggaacgcaggtaccagcggtgcgccttgtcctcccaaggcaatatcgcgacggcgaaaatcaccgacaaccgtaattccggtgcgtgccacaatttgattgttatcgccaatctgtaaagtgtgtggtgccacgcccgtcggttcatgccagacggtttgaccgtgacaaccgatcgcaactatatctcttgcctgcagattttgttccttaagcaaggcattgaccgcatcagcaaaaagtcgcccgagttgagtatcaagctgtccaaactgcgaaagtgtaagctgctggccctggcaaatatccagtacagcctgtttcagagataccgggatcggccaactcaaacttgccagctgtgcgacccggtgttcatcaattgtcgccaacacaacatcaacaccatcaaggctggtgcctgacataacgccaataaagcggcccgatttcatagttcatcctttttcaatctgacgtttgcgcaccactcaaacataaacttttcgtgaataccatgcggaatgaccgatttttaccgttggtagtaaaacattatcttcaaatcaataatcatcatgaatgttttgtttataattggttgatcctactttcattatgatttgctcatatttggtagaacatgtaaccatggattcacatatgccatatactttgaccatgagggatgcttgcgtggcgtttcatggtgaacaggagatttttcaatgattaaacgcgtattggttgtttcaatggtaggtctgtctcttgtcggttgtgttaataacgacaccctgtcaggggatgtttataccgcttctgaagcgaaacaagtacagaatgtcagctatggcaccatcgttaacgtacgtccggtacagattcagggcggtgatgattccaacgttatcggtgcaattggcggtgctgttcttggtggtttcctggggaatactgttggtggcggaaccgggcgttctctggctactgcagcaggcgctgttgcaggtggcgtagctggtcagggcgtacagagtgcaatgaacaaaacgcagggtgtcgagctggaaattcgtaaagacgatggtaataccatcatggtggtacagaaacaaggcaacactcgtttctctccgggccaacgtgtcgtactggccagcaatggcagtcaggtgaccgtttctccgcgctaaataagtttgcgtgtggtcaggttactgaccacacgcccccttcatttcaccctttggcctgtaactcaatgatattatgctcaagttttgcgatgagcgtaatcagttgctccagttcctctgcggagatgccatgtaatatttccgcgcgggttttgttaataacagcttccatttcgctgatcagcggctctgccttttccgtcagtttaatacgtttagcccgacgatcgctggcacaagtttgacgcgaaattaaccctttttcttccagttggtccagagtacggaccagtgatggctgctcgatgccaatcgcttttgccagttgaatttgcgactggtctggaggtaactgatggatattgtgtaacgtaacccaatgggtttgtgttaactccagcggtttcaggcgatggtctatcagagcacgccatatgcgcaccaaccgtgccagatcagaacctagtggcgattccaatttcatctccttataattagcttgctaagatattatgcggcttttagaatagtgtgcagcaattgtattgctaaaacaaatgtattgctgcatttggttaccgtcagacatatttttcagaaattgcgcgtaaatttttcgcacttaaagaatatttattaatctaacgcaatatattcggtcgtaaaggaatctactttgtgaagtttatgctcaatgcaacaggattgcccttacaagatctggtgttcggtgcgtccgtctactttcctccgtttttcaaagcattcgcgtttggattcgtcatctggcttgtcgtacaccgcctgcttcgtggctggatctacgccggtgacatctggcatcccttgttaatggatttatcgctgtttgcgatttgcgtttgccttgctctggcaatactgattgcgtggtaactatgtcaattaaaacaattaagtatttctcaacaatcattgtagcggtagttgcggttcttgccggatggtggctgtggaattattacatgcaatctccgtggacacgcgacgggaaaatacgcgcagaacaggtttctatcaccccacaggtgtcgggacgtattgttgagctgaatataaaagacaaccagctggttaacgcgggggatcttctgctcacgatcgataaaacgccctttcagatcgccgagctgaacgcacaggctcagctggcgaaagcgcaatctgacctcgcaaaagccaataacgaagcgaatcgtcgtcgtcatctctcacaaaattttatttctgccgaagaactcgataccgctaacctcaatgttaaagcgatgcaggccagtgttgatgccgcacaggcgacgctgaaacaggcacaatggcaactggcgcaaacggaaattcgcgccccggtgagtggatgggtgactaaccttactacccgcatcggcgattacgctgataccgggaaaccgctgtttgcccttgtcgacagccactcgttttacgtcattggttattttgaagaaaccaagttgcgccatatccgcgaaggtgcaccagcacaaattaccctctatagtgataacaaaacgttacagggtcacgtttccagtatcggtcgggcgatttatgatcagagcgttgaaagtgactcaagccttattccggatgttaaacctaacgtcccctgggttcgactcgcccaacgcgttcccgtccgctttgcgctggataaagtcccaggcgatgtcacgttggtgtcgggcaccacctgtagcattgccgtaggtcaataatgaacgcatcgtcatggtccttgcgcaatttgccctggttcagggccacgctggcgcaatggcgttatgcgttacgcaataccattgccatgtgtctggcgctgacggttgcctattatttaaatctggatgaaccctattgggcgatgacctcggctgcagtggttagctttcccaccgttggcggtgttatcagcaaaagcctcggacgcatcgctggcagtttgctcggagccattgcggcactgcttcttgccgggcatacgctcaatgagccgtggttttttctattgagcatgtcggcgtggcttggcttttgtacctgggcctgtgcgcacttcacgaataacgtcgcgtatgcatttcaactggcgggctacacggctgccatcatcgcctttccgatggttaatattactgaggccagccagctgtgggatatcgctcaggcgcgcgtttgcgaggtaatagtcggtattttgtgcggcggcatgatgatgatgatcctgccgagcagttccgatgctactgcccttttaaccgcattgaaaaacatgcacgcccgattactggaacatgccagtttactctggcagcctgaaacaaccgatgccattcgtgcagcacatgaaggggtgattgggcagatactgaccatgaatttgctgcgtatccaggctttctggagccactatcgttttcgccagcaaaacgcgcgccttaatgcgctgctccaccagcaattacgtatgaccagtgtcatctccagcctgcgacgtatgttgctcaactggccctcaccgccaggtgccacacgagaaattctcgaacagttgctgacggcgctcgccagttcgcaaacagatgtttacaccgtcgcacgtattatcgccccgctacgcccgaccaacgtcgccgactatcggcacgtcgccttctggcagcgactacgttatttttgccgcctttatctgcaaagtagtcaggaattacatcgtctgcaaagcggtgtagatgatcataccagactcccacggacatccggcctggctcgtcataccgataacgccgaagctatgtggagcgggctgcgtacattttgtacgttgatgatgattggcgcatggagtattgcttcgcaatgggatgccggtgccaatgcattaacgctggcagcaattagctgcgtactctactccgccgtcgcagcaccgtttaagtcgttgtcacttctgatgcgcacgctggtgttactttcgctattcagctttgtggtcaaatttggtctgatggtccagattagcgatctgtggcaatttttactgtttctctttccactgctggcgacaatgcagcttcttaaattgcagatgccaaaatttgccgcattgtgggggcaactgattgtttttatgggttcttttatcgctgtcactaatcccccggtgtatgattttgctgattttcttaacgataatctggcaaaaatcgttggcgtcgcgttggcgtggttagcgttcgccattctgcgtccaggatcggatgctcgtaaaagccgccgccatattcgcgcgctgcgccgggattttgtcgatcagctaagccgccatccaacactgagtgaaagcgaatttgaatcgctcacttatcatcacgtcagtcagttgagtaacagccaggatgcgctggctcgccgttggttattacgctggggtgtagtgctgctgaactgttctcatgttgtctggcaattgcgcgactgggaatcgcgttccgatccgttatcgcgagtacgggataactgtatttcactgttgcggggagtgatgagtgagcgtggcgttcagcaaaaatcactggcggccacacttgaagaattacagcggatttgcgacagccttgcccgtcatcatcaacctgccgcccgtgagctggcggcaattgtctggcggctgtactgctcgctttcgcaacttgagcaagcaccaccgcaaggtacgctggcctcttaattacttaattacaccacaggcatagcgttcaccgccaccgcccagcggtttaggttgatcggacatattatcgccgccaacgtggaccatcagcgctttgtctttgatttcatccagtgatttcagacgaggcgcgatgacggcatcggtagctttgccgtcattattgacgaccagtgcaggcagatcgcctaaatgcccggcaccttctggcccttcatgtttaccggtattttgtggatcaagatgcccgcctgcggattccgcggcgctggctttgccatctttggtggctggctggcagcttcctttggcatgaatatggaagccatgttcaccggggggtaatgctttcagatcgggcgaaaactccagacctttatcggtttcagtaatggtgacgctaccaattgactgccctaccccttgcgacgtgacgaggttcatctcgactttttcactggcagcttgtgcgccggttgcaacaaccagcgccagaatagccagactaaaacgtttcataggacctccgttcattgtgcattcctgaataagtgtaaaccagtgacacatttttgaacggcggctattcctaaaagtgcttacggtacgtcgtaccccagtgccgctttacggatacgaaaccattgttgacgggtcattttcagtgtttctgcttcgacagctgcccgtacgcgctcaattttacctgaaccgataattggcagcggctgcgatggtaaacgtaatacccaggcgtaaaccacctgttcaatcgagcccgcgtttaactcctctgccaccacagccagttcatcacgcagcggctggaaataatcatcattaaacagacgaccaccaccaaggcaggaccacgccatcggacgaacacgcagttgttgtagttggtcgagcgtgccatccagcagtaacggctgatgcaccggggatatttccacctgattagtggcaagggtaaacggcagacgtgattgcaacagggcaaattgcgcaggcgtaaagttcgatacgccaaaatgacgcactttgccgctctgatgcagatgtttgaacgcgtccgccacttcatcggcatccattaacgggtctggtcggtggattaacagcaaatccagatgatcggtcgcgagattaattagcgactgttcggcgctcttaatgatgtgatcgcggtcagtgatgtaatgaccaatgacgttttcttcacgcgcggtcgtcgcgataccgcatttactgacgatttccatccgttcacgcaggtgaggtgccagtttcagtgcctcgccaaacgccgcttcgcactgatagccaccataaatatcagcatggtccacggtggtcacgccgagatccagatgctcttcaataaaactgaccagctggcgggcggacatattccagtccatcaatcgccagtagcccatcacaaaacgagaaaactccgggccttgcggcgcaatagtaatacgctgaaccataatcgcttcctcttatcagatatgagaggagtatacgcaagattaggttcaaaagagtgatggttgctccggttcgtctgatgacgctggcttatttgcgcgtaatttgcgcattaatcgctgccgacaaaggcgcagcacctcttgtttttcgccatcgctcattttattccagttaaaacgctcatcacgactacgaaaacagccgcgacaaaacccgcgttcgtcagactggcaaattccccggcacgggctctggacgggaaagaactctaattgctccgccacttcgccctcctcagataagattattaccattattgaagctgttaatgtccaaagtagcaactttgcttgcactagaccgactggtctactacactccaacgcatgaacaaacacaccgaacatgatactcgcgaacatctcctggcgacgggcgagcaactttgcctgcaacgtggattcaccgggatggggctaagcgaattactaaaaaccgctgaagtgccgaaagggtccttctatcactactttcgctctaaagaagcgtttggcgttgccatgcttgagcgtcattacgccgcatatcaccagcgactgactgagttgctgcaatccggcgaaggtaactaccgcgaccgcatactggcttattaccagcaaacactgaaccagttttgccaacatggaaccatcagtggttgcctgacagtaaaactctctgccgaagtgtgcgatctgtcagaagatatgcgcagcgcgatggataaaggtgctcgcggcgtgatcgccctgctctctcaggcgctggaaaatggccgtgagaaccattgtttaaccttttgtggcgaaccgctgcaacaggcacaagtgctttacgcactgtggcttggcgcgaatctgcaggccaaaatttcgcgcagtttcgagccactggaaaacgcgctggcccatgtaaaaaacattattgcgacgcctgccgtttagcaggcattttttatcaccagacgaccgggagcctttatgtcatctgaaaaactgtattccccactgaaagtgggcgcgatcacggcggcaaaccgtatttttatggcaccgctgacgcgtctgcgcagtattgaaccgggtgacattcctaccccgttgatggcggaatactatcgccaacgtgccagtgccggtttgattattagtgaagccacgcaaatttctgcccaggcaaaaggatatgcaggtgcgcctggcatccatagtccggagcaaattgccgcatggaaaaaaatcaccgctggcgttcatgctgaaaatggtcatatggccgtgcagctgtggcacaccggacgcatttctcacgccagcctgcaacctggcggtcaggcaccggtagcgccttcagcacttagcgcgggaacacgtacttctctgcgcgatgaaaatggtcaggcgatccgtgttgaaacatccatgccgcgtgcgcttgaactggaagagattccaggtatcgtcaatgatttccgtcaggccattgctaacgcgcgtgaagccggttttgatctggtagagctccactctgctcacggttatttgctgcatcagttcctttctccttcttcaaaccatcgtaccgatcagtacggcggcagcgtggaaaatcgcgcacgtttggtactggaagtggtcgatgccgggattgaagaatggggtgccgatcgcattggcattcgcgtttcaccaatcggtactttccagaacacagataacggcccgaatgaagaagccgatgcactgtatctgattgaacaactgggtaaacgcggcattgcttatctgcatatgtcagaaccagattgggcggggggtgaaccgtatactgatgcgttccgcgaaaaagtacgcgcccgtttccacggtccgattatcggcgcaggtgcatacacagtagaaaaagctgaaacgctgatcggcaaagggttaattgatgcggtggcatttggtcgtgactggattgcgaacccggatctggtcgcccgcttgcagcgcaaagctgagcttaacccacagcgtgccgaaagtttctacggtggcggcgcggaaggctataccgattacccgacgttgtaatccaacattgcgagcggcgtaaagccgccgctatactaaaacaacattttgaatctgttagccattttgaggataaaaagatgcgtcttcttcataccatgctgcgcgttggcgatttgcaacgctccatcgatttttataccaaagtgctgggcatgaaactgctgcgtaccagcgaaaacccggaatacaaatactcactggcgtttgttggctacggcccggaaaccgaagaagcggtgattgaactgacctacaactggggcgtggataaatacgaactcggcactgcttatggtcacatcgcgcttagcgtagataatgccgctgaagcgtgcgaaaaaatccgtcaaaacgggggtaacgtgacccgtgaagcgggtccggtaaaaggcggtactacggttatcgcgtttgtggaagatccggacggttacaaaattgagttaatcgaagagaaagacgccggtcgcggtctgggcaactaatctcctgccgggcgtgaactcatcgcgcccgcatctttactgcatcgacaagtaatatttgtcataatgcgcgctgcaatttatccgtattaagagaatcagatgtccgataacgctcaacttaccggtctgtgcgaccgttttcgtggtttttatcctgttgtgatcgatgttgaaacagccggatttaacgccaaaaccgatgcgctgcttgagattgccgccatcaccctgaaaatggatgaacaaggctggctgatgccggacaccacattacatttccacgtcgaaccatttgtcggcgcaaatttgcaaccagaagccctcgccttcaacggcattgacccgaacgatcccgatcgcggcgcggtcagcgaatacgaggcgctgcacgaaatttttaaagttgtacgtaaaggtattaaagcgagcggctgtaaccgcgccattatggtggcgcacaatgccaattttgatcacagctttatgatggccgccgcagaacgcgcctcactgaaacgtaacccgttccaccctttcgccacttttgacactgctgcactggccgggctggcactcggacaaaccgtattgtcaaaggcttgccagaccgctggcatggacttcgacagcacccaggcgcactccgcgctgtacgacaccgaacgcactgctgtgctgttttgtgaaatcgtcaaccgctggaaacgtctgggaggctggccgctatctgccgccgaagaggtgtaatcgagtcgatgcctgatgacatgcaatgattcaggcatctatagtgaggctattccacgcatcctgcatgatattcacggggaatagcgttaatggcagataatccagacccttcatcgctcctgccggacgtgttttcaccggcgacccgcgactggtttcttcgcgcttttaaacagccgaccgctgtccagccgcaaacctggcatgtggcggcgcgaagcgaacatgcgctggtgattgcaccgaccggctccgggaaaacgctggcagcatttctctacgccctcgatcggctcttccgcgaaggcggcgaagatacccgcgaggcgcataagcgtaaaacctcacgcatcctctatatttcaccgataaaagccctgggcaccgacgttcagcgcaacttgcagatcccgttgaagggtattgccgatgaacggcggcggcgcggcgaaacggaagtcaatcttcgcgtagggatccgtactggcgatacgcctgcacaggaacgcagcaaactcacccgtaatccgccggatattctgatcaccacacccgaatcactctatctgatgctgacctcccgcgcgcgcgaaacgctacgcggcgtcgaaacggtaattattgatgaagtccacgcggtagcgggcagtaaacgtggtgcgcatctggcgttaagtctggagcggctcgatgcgctgctccacacctcagcacagcgaattggcctttctgccactgtgcgctcagccagcgatgtggcagcatttcttggtggcgatcgcccggttacggtagtcaacccgcccgcaatgcgccatccgcagatacgaattgtcgtaccggtcgccaatatggatgatgtctcatcggtcgccagcggcaccggcgaagacagccatgccggccgggaaggctccatctggccatatattgaaacgggtatccttgatgaagtgttgcgccatcgctcgaccattgtctttactaattcgcgggggctggcggaaaaactgacggcacgattaaatgagctttacgccgcacgcttacagcgttccccgtctatcgccgttgatgcggcccatttcgagtcgacctccggcgcaacctctaaccgtgtacaaagtagcgacgtttttattgcccgctcacaccacggctccgtctctaaagaacaacgagcaatcaccgaacaggcgctgaaatcgggtgaattacgctgcgtggtcgcaacctccagtcttgaactggggattgatatgggcgcggtggatctggtgattcaggtggcaacgccgctttctgttgccagtgggttacaacgcattggtcgcgccggacatcaggttggcggtgtatctaaagggctgtttttcccccgtacccggcgtgatttagtcgattccgcagtcattgtagagtgtatgttcgcaggcaggctggaaaacctgacaccaccgcataatcctctcgacgtccttgcgcagcaaaccgttgccgccgcggcgatggatgcattacaggtagacgaatggtactcccgcgtacgccgtgccgcaccgtggaaagatctgccaagacgtgtttttgacgccacgctggatatgctttccgggcgctatccctctggcgatttttctgcttttcgccccaaactggtctggaacagggagaccgggatattgaccgcccgacctggcgctcaattgttggcggttaccagcggcggcaccattccggatcgtggcatgtatagcgtgttattacccgaaggtgaagaaaaggccggttcgcggcgggtgggtgaactggatgaggagatggtatatgagtcgcgggtgaacgacattatcactctcggcgctacctcatggcggatccagcaaatcacccgcgatcaggtgattgtgactcctgctccgggtcgttctgcccggctccccttctggcgtggtgaaggtaacggacgtccggctgaattaggcgagatgatcggcgattttcttcatttgctggcggatggcgcgttcttttccgggactattcccccgtggctggcagaagaaaatacgatcgccaatattcaggggttgattgaggagcagcgcaacgcgacgggcatcgttccggggagtcgccatctggtcctcgaacggtgccgtgatgaaattggtgactggcgtattattttgcactctccctatggaagacgggtgcatgaaccctgggcggtggcgattgccgggcgaatacatgcgctatggggcgctgacgcgtcggtggtcgccagtgatgacggcattgttgcacgtattcctgacaccgatggtaaattgcccgatgccgcgatttttttgtttgaaccagaaaagttgctgcaaattgtccgcgaggcggtaggcagctcggcacttttcgccgcccgttttcgcgaatgcgccgcgcgggcattattaatgccggggcgcactccgggccatcgcaccccgctttggcaacaacggctgcgcgccagtcagttgctggaaatcgctcagggatatccggattttccggtcattctcgaaaccctacgcgaatgtctgcaagatgtttatgatcttcccgcactggaacgtttgatgcgtcgcctgaacggtggcgaaattcaaatatccgatgtaacgaccactacgccctcgcctttcgccacaagtttattgttcggctatgtcgcggaatttatgtaccagagcgacgccccgctggcagagcgccgggcatccgtactgtcgctggacagcgagttactgcgcaatctactcggacaggtcgatccgggggaattactcgacccgcaggtcattcgccaggtggaagaagagttgcaacgactggctcctggcagaagagcgaaaggtgaagaaggattgttcgacctgctgcgcgaactggggccaatgaccgttgaagacctggcgcaacggcatacaggcagcagtgaagaggttgcgtcgtatctggaaaatcttcttgcagtaaaacgaatcttcccagcgatgattagcggacaggagcgtcttgcctgtatggatgatgccgccaggctgcgtgatgccctcggcgtacgactaccagagtcattgccagagatttatttacatagagtcagttacccgcttcgcgacctctttctgcgctatctccggctcatgctctggtcacggctgaacaactggctcatgagtttagtctcggtattgccattgtcgaagagcagcttcagcaactgcgtcgagtaggcagcctggcggctgcggcttgtcatggtctggaattaccgttataaaaaaagataatgtcattgtctttcaggtagttatatggcccgttcagctaaaccccgtaaacgaaaacctgcccctcaaagaagcaaacttccccgctatgtcgtgaagcttcacgacgatgacttctttgacgaagaagacgcagaagctctgcgctttgataattttgacgatgccgttgagtgctgcgcagacctgaatattcccttctttgtggatgccggaaacaaaaagctggtcttctggtttgttcgtgtcgatgacgaagggtatcctgaaatagcccgctgcacggagcgggagtttgcaaccattcttgccggtatcagcgccggcggcatgtactgcccggagtgtggcacggttcactggccggacggagtccccccacccgtctgatgcttccccgttttgccgatatttttcagcagggtaaccgctggcttaactggctggagaaacagccggaaggttcagtgcgtccggtggtgactgagtcagtgacaaaaatcatggcatgcgggaccacgctgatgggctacacgcaatggtgctgttcgtcaccggactgttgccacaccaaaaaggtctgcttccggtgtaaaagccgctcctgtccgcactgcggggtgaaggctggcgcacagtggatacagtatctgctgagcctggtccccgactgcccgtggcagcatattgtgttcacacttccctgccagtactggtccctggtgttccacaaccggtggttactggcagagatgagccgcattgctgcggatgtgatactggaaatctgccatcagacagatgtggagccggggatattcacggtgatccacacatgggggcgtgaccagcagtggcatccgcatatccatttatcgacaactgccggtggtgtgacgtcgggccacacctggaaaaatcttcatttttacgcccgtaaggtgatgagcatgtggcgttaccggataacgcggctactgtcccggaaatacccggagctggtaataccggatgaactggcagtggaaggaaacagcaaacgggactggaatcgcttcctggacacgcattaccggcggggctggaatgtcaacatatccagggtgatggataacgccacacatgtggcggtgtacttcggctcttacctgaaaaagccaccggtgccgatgagtcggctggagcattatgccggtcaggatgaaatcggtctgcgttacaacagtcaccgtacaaaacgggaagaatacctgttgatgagtggagatgagttcatggaaaggttctcctggcatgtagcagataaggggttccgtatggtgaggtactacggttcctgagtccggtgaagcgccgcttactggaagaagttgtgtacgtcataacggagacggtgagaaaaacggcgatgcaaatcaggtggagagggatgtatcagaggttactgaaggttgacccgctgaagtgcattctgtgcggaagtcagatgcgttttacggggctgaagcggggttaccgactggcagagctggtcctgatgcatgagcgactggcacgacagcaggtgtgcggctgagagccgcagaggggaagttgcgtccattttaccggaaacggagcaaaaaccgccattcataccctgtatcaatcagtgtcatcctgtttaatagtcgtttccgctcatatggtgcacaaggggtgttgaagaaatatccgttttgtggtgcttttttagtcttttggggatttaaattcctatcgatgaacagggtctggtgatgaatctgcaacaagacatctgggtgagcgatgaagtatttcgtcgtctgcgtttgcgctcgctgcaagccgccagagaagcgacgcgtcccgttgcagccacgacctatgcgcgattgctgctggaacgtcagggcgtattacccgccaccgatggtagcccggcgctctttgcctcaacatcgccaggcgtttatgagggcgtagatggcgtgatgcgggtgatcgaacagcttgccggagtcggtttacccgcctcactctgggaaagccagatcctgcctgcccgcgtacgcgactattcgtcagaaatgctcgatgaattactggcaaccggtgcggttatctggtcggggcaaaaaaaactgggtgaagatgacggcctggtggcactgcatctacaggaatatgctgcagaatcgttcactcccgccgaagcggatcaggcgaatcgttcggcgctgcaacaagcgatagtcgctgttctggctgacggaggagcctggtttgcacaacaaatcagccaacggatacgcgacaaaatcggcgaatcggttgatctctctgccctgcaagaggcgttatgggcgctggtctggcaaggcgtcatcaccagcgacatttgggcaccgttacgcgccctcacccgcagcagttccaacgcacgcacctcaactcgccgcagtcaccgggctcgtcgtggacgtcctgtctatgcgcaacccgtctcgccgcgggtatcttacaacacaccaaatctggctggacgctggtcgttattgcaggtggagccactaaacgataccgaaaggatgctggcgctggcggaaaatatgctcgaccgctacggcatcatcagtcgtcaggcggtgatagccgaaaatatccctggcgggtttccatcgatgcaaacgctttgtcgaagtatggaagactccgggcgaattatgcgaggtcgttttgtagaaggtctgggtggcgcgcaattcgctgaacgtctgactattgaccgattgcgcgatctggcgacacaagccacgcaaacgcgccactatacaccagtggcgctctctgccaacgatccggctaatgtgtggggaaatcttctgccctggcctgcacatccggcaacgctggttccaacgcgtcgggcgggtgcgctggtggtcgtttctggcggcaaattgttactctatctggcgcaaggtggcaaaaaaatgctggtctggcaggaaaaagaggaattactcgccccagaggttttccacgcgctgactaccgcactgcgtcgcgaaccacggctgcgctttacgctaacagaagtgaatgatctaccggtccggcaaacgccgatgtttacgctgctgcgtgaggcgggattttcaagttcgccacaagggctggattggggatagagaaaggactgacggatgcccgttcgcatccgtcagtattgcaggacggattattccgcgtccggctcttcagacttgtatttagcggcagtttctttgatcagctgctgcagttcgccacgctgatacatttcgatcacgatatcacaaccgccgaccagctcgccgtcaacccacagttgcgggaaggtcggccagttagcatatttcggcagttccgcacgaatgtccggattctgcagaatatcaacataggcaaaacgttcgccacatgcggcaagcgcctggactgcctgggcagagaaaccgcagctcggcagtttcggtgaacctttcatgtacagcaggatcgggttttcagcaatctggcgttggattttttcgatagtggtgctcattgtcttgcttcctcaaacttctttacggcagtaatctgacattgtagcgggtcagtgcggcatcggaaaataacattttcatcacgcttttgctattttatccctttgctctatttgttgcatttcaaatattcgtttcttctctgatgccggcaaactggcgtatttataaccatttttagctttcactgctgcatttttttgcgctcgccaacgaaacgtattttttaacaataaaagctattaactttctcttcttctatgcattagaatcatcaagttttgtaaatcagacgcaggcatgatagacctgccttaacagagggacgctcagtggcgcggataaaccgtatttcgatcacgctctgtgctttactttttaccaccctgcctttaacgcctatggcccatgcttcaaagcaagccagggagagttctgctaccactcatatcaccaaaaaagcagataaaaagaaaagcacggcaaccaccaaaaagacccagaaaacagcgaaaaaagccgccagtaaaagtacgaccaaaagcaaaaccgcttcttccgttaaaaaatcttccattaccgcttctaaaaacgccaaaactcgcagcaaacacgccgtcaataaaacggcctcagccagctttaccgaaaagtgtaccaaacgtaagggctataaatcgcattgtgtgaaagtcaaaaatgccgcgtcaggaactcttgccgacgcgcacaaagcgaaggtgcaaaaagctacgaaagtggcaatgaataaactgatgcagcaaattggtaagccatatcgttggggtggcagctcaccgcgtaccggttttgattgcagcggcctggtttattacgcttataaagatttggtgaaaattcgtattccgcgtacggcgaatgaaatgtatcacctgcgtgatgcagcgccaatcgaacgtagtgaactgaaaaacggcgacctggtctttttccgtactcagggacgcggcacagccgatcatgtcggcgtgtatgtcggcaacggcaaatttattcagtcaccgcgcacaggtcaggaaattcaaatcacttctctcagtgaagactactggcagcgccactatgttggcgctcgtcgggtaatgaccccaaaaacacttcgctaaaactttaccctgttgttacggcaacagggtaagttcatcttttgtctcaccttttaatttgctaccctatccatacgcacaataaggctattgtacgtatgcaaattaataataaaggagagtagcaatgtcattcgaattacctgcactaccatatgctaaagatgctctggcaccgcacatttctgcggaaaccatcgagtatcactacggcaagcaccatcagacttatgtcactaacctgaacaacctgattaaaggtaccgcgtttgaaggtaaatcactggaagagattattcgcagctctgaaggtggcgtattcaacaacgcagctcaggtctggaaccatactttctactggaactgcctggcaccgaacgccggtggcgaaccgactggaaaagtcgctgaagctatcgccgcatcttttggcagctttgccgatttcaaagcgcagtttactgatgcagcgatcaaaaactttggttctggctggacctggctggtgaaaaacagcgatggcaaactggctatcgtttcaacctctaacgcgggtactccgctgaccaccgatgcgactccgctgctgaccgttgatgtctgggaacacgcttattacatcgactatcgcaatgcacgtcctggctatctggagcacttctgggcgctggtgaactgggaattcgtagcgaaaaatctcgctgcataataactgatggcaaatgcagcattgcctgaagcgctacgcttatcaggcctacgcggatcatcgatgtaggtcggataaggcactcgccgcatccgacaagcgctgcatgatacgacgcctaacgcgtcttttcatgtcaacgcggatgagtcgttaacaccgcatccggcaagataaatcgcacgttgtcagcaactgtaacgcagaaggttatccttctgcgtttttgtttaattagctgttagcaacgcaaactgtttcaggttgttttctggctgacataaacaccagcaataatgccagtcccgcgacaatcgctcccatcaccggcacaaagctgtatcccagcccagcggaaattaccgcaccaccagcagctgctcccagcgcatttccaagattaaaggcaccaatattgactgatgaagacagacctggcgcttcactggcgacacgcatcacgcgcatctgtaacggcggtacgaccgcaaaggttgctgcgccccacaccaccatgctaatagctgcgccgaactcattgcgggccaggaacgggattgccagcataatcaccatcaacaacaacaaaaagcctttcaacgtgccgttaactgaacgatctgccagtttgccgccgagatagttaccgatagagaatccgacaccaatcagcaccagcattgccgtgacgaacaccggtgttgcgtgggtaatactttgcagtaccggagagatataggtgtagagagtaaacattgcaccagctcccagtaccgtcgtcagcaatgcagacagcacctgcggacgcattaataccgccagctcttttttcacttcaggtcgtgcccctgcaccacctttaggtaatgagaagaacagacttaccattgaaatcactcccagccccgccgttgccagaaatgacatccgccagccgatggtttcacccaaccaggtcgccgccggcacgccaccgatatttgccagggttaaccccataaacatagtggcaactgcgctggcctgtttatgttttggcaccacgcttgcggccacgactgaacccaaaccaaaaaatgctccgtgattcaggctggtcaaaatgcgtgaaagcatcagggtcatataatccggcgcgatggcggaaagtacgttgccgagcgtgaaaattgccatcaggaaaatcaacgcactgcggcgggcacgatgagaaagtagaagcgtcatcagcggcgcgccaaccattacgccaactgcataggcactgattaacattccggcagcgggaatcgagacatccacaccgcgcgcaatgacgggcaacaagcccattggcgagaactccgttgtcccgataccaaacgcgccaatcgccagcgccagcaacggatagttaattttcatgccttatctccacctcttcgcgtcattacgcgatattcattaaagtggcgaaagcatgacagcaatcacaaaaaaatgaaaataacaaaaagagaaaacacttttgccattttgctaacaaacaggaaggagatgcgagggagaacgcgctccctcgagaggaaatcagtgcagcgcggcagtcaaacccacggctacgatcaaaccgaggacgataatcgttgttaccagtgaaaatttaaggtcggtgctcatcaagttttctccttttttattaccacacaaaaagtgatattacgcatttttacacactgtgatgaaaaaatctcccgtcatttataatgataagtgtttttaccacttccccttttcgtcaagatcggccaaaattccacgcttacactatttgcgtactggccattgaccccttcctgacgctccgtgtcgtttttccggcgtaccgcaacacttttgttgtgcgtaaggtgtgtaaaggcaaacgtttaccttgcgattttgcaggagctgaagttagggtctggagtgaaatggaatggcaacaataaaagatgtagcgaaacgagcaaacgtttccactacaactgtgtcacacgtgatcaacaaaacacgtttcgtcgctgaagaaacgcgcaacgccgtgtgggcagcgattaaagaattacactactcccctagcgcggtggcgcgtagcctgaaggttaaccacaccaagtctatcggtttgctggcgaccagcagcgaagcggcctattttgccgagatcattgaagcagttgaaaaaaattgcttccagaaaggttacaccctgattctgggcaatgcgtggaataatcttgagaaacagcgggcttatctgtcgatgatggcgcaaaaacgcgtcgatggtctgctggtgatgtgttctgagtacccagagccgttgctggcgatgctggaagagtatcgccatatcccaatggtggtcatggactggggtgaagcaaaagctgacttcaccgatgcggtcattgataacgcgttcgaaggcggctacatggccgggcgttatctgattgaacgcggtcaccgcgaaatcggcgtcatccccggcccgctggaacgtaacaccggcgcaggccgccttgccggttttatgaaggcgatggaagaagcgatgatcaaggtgccggaaagctggattgtgcagggtgactttgaacctgaatccggttatcgcgccatgcagcaaatcctgtcgcagccgcatcgccctactgccgtcttctgtggtggcgatatcatggcaatgggcgcactttgtgctgctgatgaaatgggcctgcgcgtcccgcaggatgtttcgctgatcggttatgataacgtgcgcaacgcgcgctattttacgccggcgctgaccacgatccatcagccaaaagattcgctgggtgaaacagcgttcaacatgctgttggatcgtatcgtcaacaaacgtgaagaaccgcagtctattgaagtgcatccgcgcttgattgaacgccgctccgtggctgacggcccgttccgcgactatcgtcgttaatcacccgttgcgggagtctcttccggctcccgcagccactccttattcagcgtctcactatcgccgagatactcaagcaaccaggttaacgcaggcgacatatcattttgctgccatgtcagacaacatgccgaatccggaaaggggttttccagttctaatgctacccacttcccctcattaagccacggtttggcgaaatgtgttggcaccatccctatgcataatcctgccgagatacaggttgccgatgattcccagtcaggcacgacaactcttttttggttatccagcaaccaggtaatacgtttaggtagcgttcgcgaggtgtcttcgcgcaccaacgacggccagttgcgcaacgtatcatcgctgaacgggccatccatcaacgccagcgggtggtgactggcaacaacgcaactccagcttagcatccccatatcccggaaggcataacgaccgcctaccggaatcgcgcgtgttgcgccaatcgccagttccacgcgcccgtcggaaagcgcatcccagacaccgttgaacacttcctgaaagacaagaagttcgacatcatcaaaatggcgataaaaatcaacgatcatctgccgtgtacgttctggcctgacaatattatccactgcgatagctaactgaccgcgccagccgttcgctatctgctgacattgctggcgggtgatctgcatttttttgacaacagagcgcccttctttgagaaaccacgctccagcagcggtcagctccacatcacggtgccgtcgttcaaagagcggcaccgccagccactcttccagctgacgcacggtatagctgaccgcagaaggaacgcgatgcagctcctgtgccgcagcgctaaaactaccattacgcgctaccgcatcaacaacttcgagtgaatattctgaccacatagtctgcctgcaaaatttttgaaaccagtcatcaaatattaccgtttcacaacactaatttcactccctacactttgcggcggtgtttaattgagagatttagagaatatacatgcaacctgggaaaagatttttagtctggctggcgggtttgagcgtactcggttttctggcaaccgatatgtatctgcctgctttcgccgccatacaggccgacctgcaaacgcctgcgtctgctgtcagtgccagccttagtctgttccttgccggttttgccgcagcccagcttctgtgggggccgctctccgaccgttatggtcgtaaaccggtattattaatcggcctgacaatttttgcgttaggtagtctggggatgctgtgggtagaaaacgccgctacgctgctggtattgcgttttgtacaggctgtgggtgtctgcgccgcggcggttatctggcaagcattagtgacagattattatccttcacagaaagttaaccgtatttttgcgaccatcatgccgctggtgggtctatctccggcactggctcctctgttaggaagctggctgctggtccatttttcctggcaggcgattttcgccaccctgtttgccattaccgtggtgctgattctgcctattttctggctcaaacccacgacgaaggcccgtaacaatagtcaggatggtctgacctttaccgacctgctacgttctaaaacctatcgcggcaacgtgctgatatacgcagcctgttcagccagtttttttgcatggctgaccggttcaccgttcatccttagtgaaatgggctacagcccggcagttattggtttaagttatgtcccgcaaactatcgcgtttctgattggtggttatggctgtcgcgccgcgctgcagaaatggcaaggcaagcagttattaccgtggttgctggtgctgtttgctgtcagcgtcattgcgacctgggctgcgggcttcattagccatgtgtcgctggtcgaaatcctgatcccattctgtgtgatggcgattgccaatggcgcgatctaccctattgttgtcgcccaggcgctgcgtcccttcccacacgcaactggtcgcgccgcagcgttgcagaacactcttcaactgggtctgtgcttcctcgcaagtctggtagtttcctggctgatcagtatcagcacgccattgctcaccaccaccagcgtgatgttatcaacagtagtgctggtcgcgctgggttacatgatgcaacgttgtgaagaagttggctgccagaatcatggcaatgccgaagtcgctcatagcgaatcacactgatctatatcgatatacttatacttaggctgctaacaaaattttgttgtatgattgaaattagcggcctatactaatttcgagttgttaaagctacgataaatattatgtttttacggggacaggatcgttcccgactcactatggatagtcatttcggcaagggttcctcctttccctctgttctacgtcggattatagactcgcggttttttctgcgagatttctcacaaagcccaaaaagcgtctacgctgttttaaggttctgatcaccgaccagtgatggagaaactatgagttcatcgtgtatagaagaagtcagtgtaccggatgacaactggtaccgtatcgccaacgaattacttagccgtgccggtatagccattaacggttctgccccggcggatattcgtgtgaaaaaccccgatttttttaaacgcgttctgcaagaaggctctttggggttaggcgaaagttatatggatggctggtgggaatgtgaccgactggatatgttttttagcaaagtcttacgcgcaggtctcgagaaccaactcccccatcatttcaaagacacgctgcgtattgccggcgctcgtctcttcaatctgcagagtaaaaaacgtgcctggatagtcggcaaagagcattacgatttgggtaatgacttgttcagccgcatgcttgatcccttcatgcaatattcctgcgcttactggaaagatgccgataatctggaatctgcccagcaggcgaagctcaaaatgatttgtgaaaaattgcagttaaaaccagggatgcgcgtactggatattggctgcggctggggcggactggcacactacatggcatctaattatgacgtaagcgtggtgggcgtcaccatttctgccgaacagcaaaaaatggctcaggaacgctgtgaaggcctggatgtcaccattttgctgcaagattatcgtgacctgaacgaccagtttgatcgtattgtttctgtggggatgttcgagcacgtcggaccgaaaaattacgatacctattttgcggtggtggatcgtaatttgaaaccggaaggcatattcctgctccatactatcggttcgaaaaaaaccgatctgaatgttgatccctggattaataaatatatttttccgaacggttgcctgccctctgtacgccagattgctcagtccagcgaaccccactttgtgatggaagactggcataacttcggtgctgattacgatactacgttgatggcgtggtatgaacgattcctcgccgcatggccagaaattgcggataactatagtgaacgctttaaacgaatgtttacctattatctgaatgcctgtgcaggtgctttccgcgcccgtgatattcagctctggcaggtcgtgttctcacgcggtgttgaaaacggccttcgagtggctcgctaaaggctattctatcgccccctctccgggggcgatttcagatcaggcttctgtgcctggttgattcatggcattttctcgtgccgccagcacacgttctaccgtatctaccactgcctgagtttgtggatcgatttcaatgttgacgcgtgcgccaagttttttcttcccaagagtcgtgcgttccagtgtttccggaattaaatggacgcaaaaacgcgttggcgtgacttcgccgacggtcaggctaataccgtcgatgccaataaatcctttgtacagaatatatttcatcaactgactatcctggactttaaaccagatctggcgattattttctgaggttaatattttcgccacttcagcagtggtcataatatgacctgacattaagtgtccgccaatttcatcactgaatttcgccgcacgctcaacgtttacccaatcccccacttttaaatcgccaagattggtaatgcgtaacgtttctttcatcaggtcaaaactgacatggttgccgttaatttccgtcacggtcaggcagcaaccgttatgcgccacggaagcaccggtttccaggccgtccagcatgtggtcgggtaactccaccacatgcgtacgaaaatttggtttctcgtcaatcgacaccagttttgcggtgccctgtacaatccccgtaaacatacttacaactcctgaaatcagttaagacattctgttcagcacaatagcaggtggaaaacgcccttaccagtgaaggggtaagaatggctattttttcactggagaattaataaatcctcgctacaatagactgaatttcccctgcttcttctttttgctgcccattcaggcggctttttagtctctcatataactacaaataaaaggtgttcacgtgcagaagtatatcagtgaagcgcgtctgttattagcattagcaatcccggtgattctcgcgcaaatcgcccaaactgcgatgggttttgtcgataccgtgatggcgggcggctatagtgccaccgacatggcggcggtcgctatcggtacttctatctggcttccggcgatcctctttggtcacggactgctgctggcattaacgccggttatcgcgcaattaaatggttccggtcgacgtgagcgcattgcgcatcaggtgcgacaaggtttctggctggcaggttttgtttccgttctcattatgctggtgctgtggaatgcaggttacattatccgctccatggaaaacatcgatccggctctggcggacaaagccgtgggttatctgcgtgcgttgttgtggggcgcgccgggatatctgttcttccaggttgcccgtaaccagtgtgaaggtctggcaaaaaccaagccgggtatggtaatgggctttatcggcctgctggtgaacatcccggtgaactatatctttatttatggtcatttcggtatgcctgagctcggtggcgttggttgtggcgtggctactgcggcggtgtattgggtcatgttccttgccatggtttcttacattaaacgcgcccgctccatgcgcgatattcgtaacgaaaaaggcaccgcaaaacccgatcctgcggttatgaaacgactgattcaactcggtttgccgattgcgctggcactgttctttgaagtgacactgtttgccgtcgtggctctgttagtgtctccgctcggtattgttgatgtcgcaggacaccagattgccctgaactttagttcactaatgttcgtgcttccaatgtcgctggcggcagcggtaactatccgcgtaggttatcgtctgggtcagggctcaacgctggatgcgcaaaccgctgcgcggaccgggcttatggtgggtgtctgtatggcaaccctgacggccattttcacggtttcactgcgggagcaaatcgccctgttgtacaacgacaatcccgaggttgtaacgctggctgcgcatttgatgttgctggcggcggtatatcagatttctgactcaatccaggtgattggcagtgggattttgcgtggttataaagatacgcgttccattttctatattacctttacggcttactgggtgctgggcttgccaagcggctatattctggcactgaccgatctggtcgttgaacctatggggccagcaggcttctggataggctttattattggcctgacgtcggcagccattatgatgatgttgcgtatgcggttcctgcaacgtctgccgtcagccatcattctgcaacgagcatcccgctaataaagacaaggcgcaaccttcacgggttgcgcctgtatttttacgcaggctggagcgttgcgccaatcccgtcttcgtctggctgtaatttcagagcgttacacagagtttgccgactggcatctgttatctcaacgtgtatatccccggtaacttcccctttcacattgatgaagtcaggtgaaatttcttttgcactggtttgcaggcaaatcgctccctctccgcgcaggcgtttcactttcagttgcacatgcgttgccgcatcagtgatcagccacagttttccaccattcagattgatgttaccaacaatgaaagtgacaccgtcaccttttaccgtactgccgtctagaatcaacacaccgccctgctgtacagtaatcgttgattgttgcagctctgcgccataaccaataatcattgaagcgccgtccagtaatgcaacactcccggtcagttcaaccggtgcgcgatcttcctctacgacaaaattttcgtccgcgctggtgggtgacaacaggatcactgtcccaccttgtattaccgcgttttccagcgtaccggcatgcacttcagcccgaccacccacattcacggacaggttttgcgtcttaccggaactgtagagctgaaggccatccgtccccagacgataaatggatccattctcaacaatagtgtcagagtcttcaccaccgagattattcatggtgccaccagcaagcaacgtatcactggctttcccggccagcataaaaacgccgccctgattaatctcacaattgctggcttccccacctggatacaccaacaattcaccaccttcatctaccacgaccgctgaggttgtcccattaaccaacaggccgccctcttgatcgagaatgattttttccgcgcgatgtccttccagtacacgcaggttaccgccattttccagcaacaaaccgcaggcataacctttatcaacgctgaattcaccttcgggatggcggccattaaccgtagcgagcgtagagagactaattgcgcctccctcggactgaacaatatctgtggcaatggcaccatcgctgaccgatagcgtgccattgttaccgtactgtgtgcatttggcgatcccaccggttgccactttcaaccagccagcccccgtgaccacggtattttcggctcttccgccagcttcaacaatcaactcgccttcagtaagttgcgtcgcgccaatgacctcgccggtcttaacaatttgcacgttcccgtcgctcatcaagtttttcgcatcagatcccatgatttattcctttgctgcatctgtgtgcctttattgctacctaagtgtaaaggctacggaggatttatccacgacagatttgagatggtggcaaacaactctgtttaaactctgatacacgaattattgggttgtatcagatgtaaatgcgatcctgaataaaaatcacccttgcaaatcaacaaaatatagccaatttgcttaaaagctctgcaaacggtcgaaatagcgcagaaaattacgttttgcctcttgccaccttcccactctgccgctaatattcgtccccgttgtcacctacaacgttgcgttcatagctcagttggttagagcaccaccttgacatggtgggggtcgttggttcgagtccaattgaacgcaccatcctgcgtccgtagctcagttggttagagcaccaccttgacatggtgggggtcggtggttcgagtccactcggacgcaccagattttcttaatctggtcttctcctttttccctctgtttcttctctgtatccaatacgttaaaagatttacactgtcttcgtatgcgttatcagaaggagaatcgctatggcaactttgttacaacttcattttgcttttaatggcccatttggcgacgcaatggctgagcagcttaaaccacttgctgagtcgattaatcaggaacctggttttctgtggaaggtatggacagaaagtgaaaagaaccacgaagccggtgggatctaccttttcactgatgaaaaaagcgcccttgcctatctggaaaaacatactgcccgactgaaaaatctcggcgttgaggaagttgtcgccaaagttttcgatgtcaatgagccacttagtcaaatcaatcaggcaaaactcgcctgacagaatttaatcaagggcggttagcgcccttttcatccctgtctgaaatttctcaaattctaaaaatctcaaccaaacttatctgataacactaaattcgaaagaatgcgtacaggtaagtaacaatgaaaaaaattgctattgtgggtgccgggcctacggggatctacaccttattctcgcttctacagcaacaaactccactttctatttctatcttcgagcaggctgacgaggccggtgtcgggatgccatacagtgatgaggaaaactcaaaaatgatgctggcaaatattgccagtattgaaataccgccgatttattgtacgtatctcgaatggctacaaaagcaagaagacagccatctccagcgttatggcgttaaaaaagaaaccttgcacgatcgtcagtttttaccgcgaattctgctgggcgaatatttccgcgatcaatttttacgactagtagaccaggcacgacagcaaaaatttgcagtggctgtttatgaatcatgccaggttaccgatctgcaaattacaaatgctggcgtcatgctcgctacaaatcaggatttacccagcgagacgtttgatttagcggtgatcgccacgggtcacgtctggcctgatgaagaagaagcaacccgaacgtattttcccagcccgtggtcaggcctgatggaagcaaaggtcgatgcgtgtaacgtgggtattatgggaacatccttgagcggactggatgcggcaatggcagtggctattcagcatggttcgttcattgaagatgataaacaacacgtcgtttttcaccgcgataacgcaagtgaaaagctaaatatcacgttgttgtcgcgcacgggtattttacccgaagccgatttctattgccctattccctacgagcccttacacatcgtcaccgatcaggcattaaatgctgagattcaaaaaggcgaagagggccttttggatcgggtatttagattgatagtagaggaaatcaagtttgctgatccagactggagtcaacgcatagccttagagagcctgaatgtcgattcctttgctcaagcctggtttgccgagcgcaaacaacgcgacccatttgactgggcagaaaaaaatctccaggaagtcgaacgcaataaacgagaaaaacatactgttccctggcgttatgtcattctgcgcctgcatgaagccgtacaggaaattgttccacatctgaatgaacacgaccataaacggttcagtaaaggccttgcccgggttttcatcgataattatgcggcaatcccttcagagtctattcgtcgcctacttgccttacgtgaagcgggaatcattcatattctcgccctcggtgaagactacaaaatggaaattaatgagtcgcgcaccgtcctgaaaacggaagacaacagctactcgtttgacgtttttattgatgcccgcggacaacgtccgcttaaagtgaaagatatccctttccctgggctacgcgagcaattacagaaaacaggggatgaaatccctgatgttggcgaagattatacgttacagcaacccgaagatattcgtgggcgcgtagcgttcggcgcgttgccctggttgatgcacgaccagcctttcgttcagggacttacggcatgtgcagaaattggtgaggcgatggctcgggcggtcgtaaagcctgcatcccgtgctcgtcggcgtctttcgtttgattaaaggtaaagctatcagcactcaacaaactgatgctgttcattaagacgatagcggactccggctcgaatattgttttcaccttcaatggcgacggcgaagcgaactctttcgccgtcatgatatgccagtgcggcgcttcctcctggcccgagaataattgagtcgaccacgcccgtgctcactaccgttgaattttcaccgctggcaatgatgtgtacattgtcgccgctgttggcaattctggcgtttgcgccaaagctggcgatttgcaccaggtcaccattactggcgacatgacaccgttcacccaatgtacaaacgcgtactcgcattccggtattcgcaatccgactgctatctccagcgctgcttatccgcgaagaattaccggttacagcaacccgtgcgcgttcaccggagctgccaatgtgactgttaaagccgacacttccaatccgcacgctataacccatactggcaatttgcgcggcatacccagcggttgcgattctggcgttatcctcacaacagccgatgcgagcatgatcgtcgctgcgggcaaactgactgcaaaatggtctctctccggggtctgtggccagtttttgcatagaggaaacttcctgatgcgcgaagttttcatccgccagccattttttccacgcatactcaaccagactctccgcccagtccgtatatccttcctcaatcagtgcatgatgaatatcggcataactaccgccgcgtgggaaatggcgcaggaaccagcgatacatcaccgctccgatacgccattctcgcaggtctgcttgtgtaatgatcattcgttagtgccggtgatagccatcgaccatgcttttaaaggtttcgtgtggcgtacgccccgtggtgcaaagataaagatgaccgaagataaaaaagaggcttataaatgccagagcaaaatgtgtctgcaataaccagtatcttacgccaggaaacacatctcccacggcttgcggatagagacacagcagccccgtcaatagtaacaacggcagcaatccatacatgacaccaacataggcgacctgctgtaagggattaaatttagactgggttgttgccgggaaaggatgttcttccccctgcataatgccaaacaaataaaatcgcgtttgttttgccgctcgttccagccacccctgacgacgaatgcgatagtggtgaccattatccccaacggcattgatcagcacaaagccgagccagcatgccagtaacaaaaatccgcaaacttcatgcaccgcaaccagacttttaaccgcagttgcgcccaccatcgcaaagtgatttatcagcccactggccagcaacaatacaaagagtaacgcattcgaccagtgccataatctgaccgctttgctgtaaagataaatcttctcaccatgatcggtggctgatttcttcacgccacgagcacgaagcaaggcatgcagccccagcaccaaccacatcccaaccagcaatactccggcaatgatcaaccacaccggccaaaattcgggagtgaactgtggcacatagttcgctaactggctctgaaactgttcagcatgttgcgacgggttcatacattttcctttttaatcaaatgttgaccgaaccggcgatacagatgcggtttcccggcaccaggtagctgatattgatagtatttattttgctgcaaccacgcctgaatttctgggctatcttcgcgaccaaagatcaatgcgtgttccgggcaggcgctgacgcaaatgggcggaaagccttttgccagtcgggactcagcgcagaaatcacatttatctgccactttagtgacagggttaaggtagcgaacctggtacggacaagcgccaatgcaataactgcagccgatgcactgcgatttttctacccgcacgatcccctgctcatcacgccacgacgcccccgtcgggcaaacgtcgatgcacggagcatcttcgcagtgctgacatgactggcgaaaaaagtgatactgcgtttcgttgtcgttatcggtgactggaatgtgtgctatcgataaacggcttccctgagcggggacgtggttagttttacggcatgcgcgggcgcaaatattacagccattgcaccgtgactcgtcatgaatcatggcataccgaacttccttttcttgcctcgtgttcgctaacagagaagacgcagaaccagtaaaaaagattactgttcccatccccagaacaaatttgcgtcgagtgaaggacatctgattatcccctaatgcagtggctgcaactgtccaccctatccatgacatctccctgaaatttcaggggttctgaaactgctctacctcgaaccattcgcataagccataagccttgccataggtcataaatcgctcgctaaacaagtacaacaccgccgtcgatgactccacctgccgtatatcggcatattcaggtgcaacatccatcgcggcgatcgcggcttcaatctgcgcttcctggaagtaatatggcgcttgcatcagcatggcgactttgtaaggacgaggatacgtctggcactcaaaacgaacggcgtgtgcaatggcgcgacaaatgtcctgctccacaacttgcaaagacatcgccgcgtagttttcactcatggcctgcgttgagtaatagtaatcatccttgcttcccgtcaaacaagcgatatccgcgtagtctccgttctgcttaatgctttccagcaaaactgacagttcctcttctgcaaccaaatagggtggcgagagaaacacggcgcgcgccaccagctgcccagccgcagaatgctggcgaatgaactcagccaggatttcagcaggttctggttcggttaccgtatcaacggggtgacgcatcccctgcaaccattgccgcttcgcctcgtcaacttcgctgactttcgctaacggcaattcatcctgatggttcatcttacccattccttacgcaggcagtagattgtgtgctgccagatcggcggcaatatcttccagccccagacgctgcaatgtttcgcgggttggacaaccaagctgtgggtcccagcccatttctttgtagaacatcgtgagcgaagcatgcatatcgtcacgatccattttgtcagtaccttcagtaaagaccgggatctgcggatccttgtcgaatacccaggaacagataagatcgtgttcattacgcatatctttggtttgcatcagttttaccgtgtaggcacgatgcaacgtaaaaatacgctctgcagctaaatctaatttttcctgagtcatctcttcgccggtgatcgctttgaagaatttggcttcaagcgccagatcgccccggtaattacggcttttcagcggcgaaacggtcattggccagacccagttgcacagggtgacggcgttatgcaaacagacccgcaacagcgaccactttgcatatttaatttttgcgtcattgattggcgtgtagtttttggtttcatcgtaagcatcttcagaaccaaaaagttctttcgccacttcacgttgcagtttcaatggcaagccggaaccaataaagttgatatgggtatgcgtcatgcagtcacggttgaacatacagttaacaatggaaccgacctgcgctgacgcttcattggcatggtgaaccggatagccaaacggcgaccagagtttatttttcgcgtagccccagtactcttcacccaaattccagcgttctgcgatggcatatgaaccatcagccaggtgactcagctcacccacacgatgcgccagacggtagtaaaaatctttaatgaagttaacgtcacccgcttccagttgatcccagcgaatttctgcatactcttcagctggcagaacacgcttgaacacacctttgctgtaacaataagtaaagtcgcgatgcaactgcccgtagttacaccataggccgtagtcatcgaacaaattcagacccaccaggttaccaatcacacgaccatcgtctttatcttcaaaatctttcggcccgttcgggaagatggtggtatggacaaagtttgctacacaagtgttaccacctgtgctgggcacgccaaactctttcacccgaggaatattcatttgggtcatacaacggatcgggcaagagtggcagccgctcatttttactgtgtatttctctgccgccggtcctaagtcaaaaacggatttataggtacgaaagccgaccgtattctgattgcctggcggaatttcacccgtttcaatcggaccaccttcagccgcgccccaaaacagccctttacgtgctgtccagcgtgacttgggatctgaatactctgcccacgattgtggcgtacttggcacgacatggttgttattcgcaccaataagttcagtcatcatgtaatcattgagacgcttcatctcctgacgatcggcaatgttgacccctttcgtcccttcaaccgcaatcgctttcaggtttttcgaacccattattgcgccagttcccgcaccgccgctgtggttacggctattcaacatgccagagagaggaacaaggttttccccagcctgaccaatagccgccacacaggtttccggactggtcaatcgacaaatttcttccgtcgttgcgcgcgtcccttttccccataagaaatcggctttttccaggctaactttgtcatctttaatcttcagccataccggtgatttcgccttcccttcgataataatgacgtcgtatccagcgaatttcatttgcgctgcaaaaaagccacccatatgggcatcgacgactaaatttcctttggtaaaagtagaaagtgaggtgatatttacgcgagaactacagggggcaccagatccagttaatgggccggtagcaaagactaatttattcgcttcatcgaaaggtttcgtgcctggcggtacttcgtcatacataattttgtagccgaagcccatgccaccgacaaaacttttaaacttactggaatcttcgagggtaatatttcctgtcgtgagattgactcttaatatattacctgtccaaccgttagccatgattttttcctttgcaagattcacacagtaatatctttccactcgataatttttaacgcccctgttgggcaggcatttgcgcattcaccgcataacacacatttcgaggattttttactttcggtatttacggtggccatcatccacgggcatgccgtagtacaggcgctacagccaatacagcgtttatgatcgacggtaatacagccttctttctgctgccaggtaatcgcaccaatcgggcagacgttcatgcattgcggctctttgcattgacggcaggtgtccgcggtatagttgagatcgccatacaggccgccgccagagccaaccccgttgtcgccaaagaaataattgcgatggattttgatacgggagaagaatgtccctactgagccatcgttgaagttggtacaagagatttcacagcggtggcaacccgtgcatcgcgctcgctgggtcaccagcacccctttgggggtatttatcaaccctactgtgccgctatcaatatcttcctgtttgcaacccaaaagtgacagtaacgcaggggcaattgttagaccagcaaggccttttcctgatatacgcaagaattctaatcgcgttaagccaatatctaatagtggacgatcaaccgggttcatttatttcgcatcctcttcgcaaacacagtgctgacaattcagcagcctgatattaagcattcaactaatacgctgctgactctgtccccaacaccagatattttccctaacccgatagtgtatgagaaaagattaacgccgataaactaatcctttatggttaggagaaaaaataatgtgattattctgagcccttaacattgatcgttatcaattaaaattacaaagcaagaaattataagtgaactgatatttattatcatttgaaataaatttaacttaagcgacaattatttgtgactttcattgcagaaaataaaaataacattatcgctataaattaaaatacataccgaaattcgtataatttcagcagttgttatttagaatgattaactggaccgcaactgaagcaagaatatcaggatgaagcttaccgcctcatcctgaatggtcattttaccagtgcgttaatgacggtttccatcgcctgcttttccagctcactgcgctgaatgcgtttattggctaatgctgtacgtaatacgcctgcgataacaatatgctttggttcctgccccagatcgcgcatttccagcacaactttaccgacaactctgcacatttctcggtacagttcatcctcttttgtccgatttcccattctttatacctatttatcatgccaactatcagcatatatcaatctaaccaattaaacaaaaatcaaacaaaatcagacaaataacgcgataaattattttaactgtagcaattgagcgatgatatatttatacaccggatgaactttcacttatcctcacactgacaacttcggcaccagacgttgcgcaaacagtgaagtttttgcgtaaccttttccctggaacgttaaatctttgataacaatttattgtctaacaagttgtatattttttgaaacgctgtttttgttttccttttggattaatttcagcgtataatgcgcgccaattgactcttgaatggtttcagcactttggactgtagaactcaacgactcaaaaacaggcactcacgttgggctgagacacaagcacacattcctctgcacgctttttcgatgtcacctatccttagagcgaggcaccaccactttcgtaataccggattcgctttccggcagtgcgcccagaaagcaagtttctcccatccttctcaacttaaagactaagactgtcatgaaaaagaccaaaattgtttgcaccatcggaccgaaaaccgaatctgaagagatgttagctaaaatgctggacgctggcatgaacgttatgcgtctgaacttctctcatggtgactatgcagaacacggtcagcgcattcagaatctgcgcaacgtgatgagcaaaactggtaaaaccgccgctatcctgcttgataccaaaggtccggaaatccgcaccatgaaactggaaggcggtaacgacgtttctctgaaagctggtcagacctttactttcaccactgataaatctgttatcggcaacagcgaaatggttgcggtaacgtatgaaggtttcactactgacctgtctgttggcaacaccgtactggttgacgatggtctgatcggtatggaagttaccgccattgaaggtaacaaagttatctgtaaagtgctgaacaacggtgacctgggcgaaaacaaaggtgtgaacctgcctggcgtttccattgctctgccagcactggctgaaaaagacaaacaggacctgatctttggttgcgaacaaggcgtagactttgttgctgcttcctttattcgtaagcgttctgacgttatcgaaatccgtgagcacctgaaagcgcacggcggcgaaaacatccacatcatctccaaaatcgaaaaccaggaaggcctcaacaacttcgacgaaatcctcgaagcctctgacggcatcatggttgcgcgtggcgacctgggtgtagaaatcccggtagaagaagttatcttcgcccagaagatgatgatcgaaaaatgtatccgtgcacgtaaagtcgttatcactgcgacccagatgctggattccatgatcaaaaacccacgcccgactcgcgcagaagccggtgacgttgcaaacgccatcctcgacggtactgacgcagtgatgctgtctggtgaatccgcaaaaggtaaatacccgctggaagcggtttctatcatggcgaccatctgcgaacgtaccgaccgcgtgatgaacagccgtctcgagttcaacaatgacaaccgtaaactgcgcattaccgaagcggtatgccgtggtgccgttgaaactgctgaaaaactggatgctccgctgatcgtggttgctactcagggcggtaaatctgctcgcgcagtacgtaaatacttcccggatgccaccatcctggcactgaccaccaacgaaaaaacggctcatcagttggtactgagcaaaggcgttgtgccgcagcttgttaaagagatcacttctactgatgatttctaccgtctgggtaaagaactggctctgcagagcggtctggcacacaaaggtgacgttgtagttatggtttctggtgcactggtaccgagcggcactactaacaccgcatctgttcacgtcctgtaatattgcttttgtgaattaatttgtatatcgaagcgccctgatgggcgctttttttatttaatcgataaccagaagcaataaaaaatcaaatcggatttcactatataatctcactttatctaagatgaatccgatggaagcatcctgttttctctcaatttttttatctaaaacccagcgttcgatgcttctttgagcgaacgatcaaaaataagtgccttcccatcaaaaaaatattctcaacataaaaaactttgtgtaatacttgtaacgctacatggagattaactcaatctagagggtattaataatgaaagctactaaactggtactgggcgcggtaatcctgggttctactctgctggcaggttgctccagcaacgctaaaatcgatcagctgtcttctgacgttcagactctgaacgctaaagttgaccagctgagcaacgacgtgaacgcaatgcgttccgacgttcaggctgctaaagatgacgcagctcgtgctaaccagcgtctggacaacatggctactaaataccgcaagtaatagtacctgtgaagtgaaaaatggcgcacattgtgcgccattttttttgtctgccgtttaccgctactgcgtcacgcgtaacatattcccttgctctggttcaccattctgcgctgactctactgaaggcgcattgctggctgcgggagttgctccactgctcaccgaaaccggataccctgcccgacgatacaacgctttatcgactaacttctgatctacagccttattgtctttaaattgcgtaaagcctgctggcagtgtgtatggcattgtctgaacgttctgctgttcttctgccgatagtggtcgatgtacttcaacataacgcatcccgttaggctccacggaatatttcaccggttcgttgatcactttcaccggcgttcccgtccgcacgctggagaacaaggctttaatatccggtgcattcatgcgaatacaccctgaactgacgcgcaaaccgacgctgtccggcgcactggtaccatgaatgaggtattcgccattaccatgcgcgaggcgcagtgcgtaacgtcctagcgggttatttggtccggcaggaacgactggcggtaatttaatgccacgctccagcgaacgctgacgaatgcctgccgtaggcgtccaggttgggttagggattttctgcccaacacgcgtttccatcaccggcgtttccagcccctgcaatccaatacctattggataaacctgcacaatattttctcccggcggataataataaaggcgcagctctgcaaggttaacgataatcccctgacgcggtgcatcaggtaataacagttgtgaaggaatagttatcgtcgtaccaggttttggcaccggggcgatagtgttattggcttcaaggatcaacattgccgcagtatcaaaacgtcgggcaatagcctgaaggtttttatccccttcttgcaccgtatacgtttgattttgcccaaccagtcggcttccggttggtggtagcggataatcaaccgcccaggcagcctggatggcgctaaaagcgccgataagcgtgagtgtaagcaaagacgcgcgtttcattgtaaacctcctgtatttgccggagactcacgctgaaacgtcggatggcgcttatgttcacctgaaaccaaaacactcctgtgcaggtcagtgtaaacattgaccatccggcaatgtgagccaaccggatgaaagctgtccttttagtttagctaagtgcagcggctttggcgcgaattgcgcgaatcatcgcttccagaccttgtgaacgagatggggtgagatgttgggtgagcgccattttttcaaaccacggacgcacatcgaaattgacaatatcctgcggcgtcatctgatcgtagagaataaagacgaccgcaataagccctttcacaatcgccgcatcgctgtcgccctgtaattcaataattccctgggcattctggcgcatgacaatccacacctgactctgacagccctgaatgctattttgtggacttctgtcttcgtcgcgtaattctggcagacgctggcccagctcaataatgtagagatatttctcttcccagttggcgcagcgtaaaaaattacgcagcaacttttctttatccggcaataaagccatagtgcctccctgttatcccagcaaacggtgaatacgttgcaggccggtcaccagacgatccacttcttcatgggtgttatacatggccagcgacgcccgacacatcgcagggacgttgtaataggccatcaatggcattgcgcagtgatgtccggtacgcacagcaatgccgtaattatcgagaaaactgccaacatcataggcgtggtgtttaccgagattaaaagcaataacgccaagcctgttttgtgggccatagagagtgagatccggtacagattccagctgtgatagcgcataatgcatcagattctgttcatactcggctatgttattaagccccagcgccgaaacatactccagcgccgcgccaagaccaatgatgcccccggtattgggtgtaccggcttcaaaccgccatggtgctttggtccaggtagtgccttcactcaggctgacggtggcgatcatagaaccgcccccttcccacggcggcatctcctgcaacaaggcttctttcacataaagaatgccaattccggtggggccatacagtttatgcccggagaacacgtaaaagtcgcaatccagcgcctgaacatccaccggatgatgcatcaccgcctgagcgccatccaccagcacttttgcgccatgctggtgcgcaagcgtgatcatttccgccagtggattttctgtgccaagcacgttggagacatgagtaattgccagcaggcgagttttctcatcaaacagcgtaggcagcgtctccagttgcaacgtaccatcgggattgagcgggatcacacgcagctctgcgccaacgcgtgcgcaaagcatctgccagggaacaatgttagcgtggtgctccatctgactgatgatgatgttatcgcccgcccgcacgttgctgttgccccagctattggcgaccagattgatcccttccgtcgtgccgcggacgaacaccagctcttccgccgaacgggcattaataaacagcgatgcccgcttgcgcacgttctccattttctcggtcgcctgggcgcttaaggtatgaataccacgatgcaccgccgcgtagccatgacgataaaactcggcctcggcgtcaatcacctggctcggtttctgcgcactggcggcgctgtcgagataagccagcggcaaaccgtttacctcacgcgaaagcaccggaaagtcggcccgcactttgtcgacggaaaaaatcatcttgcacctcctggcagccgttgaccgattcgggccagcacctgctgtttaagcccctcatcacgcagtgcttccgtcagttcggcagcgaaggcgtaaatgatcatctgctgggcatcctgctgattgatcccgcgcgagcgcagatagaatatctgttcatcatcaatacgccccaccgtcgcgccgtggctgcatttcacatcatctgcatagatttccagctgcggtttcgtatccacttccgccagtttgcccatcagcagattgttgttggtcatctgaccatccgttttgatggcgtgctgcgcgacgttgatcaaaccgttaaataccgcgcggcctttgtcgctgacgatagttttgtgcaactgtcggctgttacaaaaacctttattgtgttccagccaggtacgggtatcacacacctcgtttttcaccggcatcgccaggctattgatccgcagcgtgctgttttcgccattgagttgcgtactggtgttgtgtcgtaacactgcgccacccagcaggaaactgtggctaaatgcggtggcatcctcagccagcaacaaatcgttatgagcaaagtggtgactgagcgggttttcaaacgccagcttgatatgctgcaagtgggcattcgctgcgacgttgatagtgaaccgtgccccggtaaaatgacgagcatcattcaggctgacaaaatgttcgatcaccgttgcttcggcaccttccgccagatccagatgatgtcggtaatgggcagtgttcacctcttcacctgccacgccctgggtgatatgcattaacagcaatggctttgccggccgttgaccgcgcttcacggcgatatgcgtcacgctttgtgccaggctttccgtcaaatgcagaaacacttccgcctgaatagcgtcgggtaaaccctgacggtcgtcgttaatgctcacttcatatccgctgccttcagttgcatcgctcagtgcgggcacgtaacgcccatcgacaaacaccagccgcacggagtctaacgttaacgctaaggcatcacgctgctgtggggatatctctcccgcaatgctgacaaactggctattgatcagcccttccagcggcgtatatttccagttttcatgtttacgtgtcggcagtccggtacgcagcaattgttgtaaatgctgctgtgcttgcggggagcgttttgtcccttcagcttcaaacaagtgatgccactgttgcagcgcgttactgctgttcggtaagccagccataaccctgctcctccagttgtttgaccaacgtgaaatcgccggatttcacaattcgtccctgatatagcacatgaacgtaatcaggcttgatgtagtcgagaatgcgttggtagtgcgtaacaatgatgaatgagcgcttgccatcacgcagcgagttcacgccatcggcgaccacttttaatgcgtcaatatccagcccggagtccgactcatcaagaatgcataactccggttccagcaccgccatttgcaaaatatcgttgcgctttttctcgccgccggaaaaaccaacgtttaccgaacgggttaataaatcttccggcatcttcaggagagcgattttctcttccatcaaatcctgaaaatcaaagcggtcgagcgtttcctggccgcgatagctgcgcaccgcattaagtgccgtttgcaggaaaaactggttactgacacctggaatctccaccggatactggaaggccataaagatgccttcgcccgcgcgatcttccggcgacagcgcaagcaaatctttgcctttgaactcaaccgtgccgcccgtcacttcataatcttctcgcccggcaagcgttgccgataaggtacttttgcccgaaccgtttggccccataatggcgtgaacttcgccgggatgaacgtcgaggcttaatccgcgcaggatagctttatcttccacgctgacgtgtaaatctttaatacttaacatgtttattccttatccgacgctgtgttcaagactgatggcgaggagtttttgtgcttcaacggcaaattccaacggcagctccgagaacacgtctttgcagaaaccgttaacaatcatcgagatggcgtcttcttcgctgatcccgcgttgcaggcagtaaaacagttgatcttcaccaatacgtgatgtcgttgcctcgtgttccagttgcgcactattgttacgacactcaacatacgggaaggtatgcgccccacaattagcgccaatcagcattgagtcgcactgagtgaaattgcgcgcattggttgccgtcggcatgattttcactaagccgcgataactgttctgactatgtccggcagagatccctttcgagataatggtcgatttggtgtttttaccgatgtggatcatcttggtgccggtatccgcttgctgatgaccgctggtcagcgccactgagtaaaactcaccaatggagttatcgccgcgcaaaatgcagctgggatatttccacgtaatcgctgacccggtttctgattgcgtccatgacattttgctgttttcgccttcgcacaaagcacgcttggtgacgaagttgagaataccgccggtgttgttatcgccaggaaaccagttttgtaccgtggaatatttcacctcggcgtttttatggatgatgacttccaccactgccgcgtgtaactgatagctgtcacgcaccggagcggaacagccttcaatgtagctgacgtagctgtcttcgtcggccaccagaatggtgcgctcaaactgcccggttttttctgcgttaatgcgaaaataggtggaaagttccatcgggcagcgcacgcctttaggcacataaataaacgtaccgtcagaggctaccgccgcattaagcgcggcaaagaagttgtcattccccggcaccacggtgccgagatatttacgcaccagttccgggtgatcgtggatcgcctcaccaaaggaacagaaaataattccctgctccgccagtttttcgcgataagtagtggcaaccgaaactgagtcgaaaatggcatccaccgccacctctttgccttcccgcacgggaacgcccaactgctcaaacgccgcctccacctctttacttaaaaaggcgttcgcgccagtttgctgcaccgcgccaggttcagacgcgcaagtgtcgtcacaattaccgcacgatggtgctgagtagtagctgtaatcctgataattcagcttgtcgtagtgcgctttcaaccagtgcggttcttccatctccagccatgcgcgataggcgtttagacgaaactccagcatccactccggctcattacgcttcgccgaaattgcgcgcaccacctcttcgtttatcccctttgccagctcatcggtggctaattgggtgaagaatccttctttataattcagcgggccgccggtccaggttttgacatcgtcagttgcttcagtattacgagacatagtaccgcctataccccaaagctttcgccacagccacattcattctgggctttagggttgtgaaatttgaatatctgattaagtccttcacgaacgaaatcgacttccgtgccatcaataaacggcatcgcttgcagcgggacaaacagcttcgcgccgtcgtgttcaaacagcagatcgtctttgtccggctcgctaacactgtcgagcacatagccaaagcccgcgcagcccgtttgcttcacgcctaagcgcacgccgaccatacccggctgctttgccaccagctcacggatgtgtatcgccgctgcgggtgtcagcgttaagccttgccaggcgaaatcttgtgggttaaaggttcctgaatgcatgtccatcgatttacctcacttcatcgctttcagcgtataacagcatgttagtgataatgattatcagttcaacccagcaaacgcaggggctttaccgtaaaacatgctttttgcctgcttttaataagcatagaccctgatgtgtgggttaacaggcacgctaagaattaggtatctcattgttagataatggttattatctaaggagcattaaggctgtgatgaaaaagaaaaagttgtattgaaaatgactatttaagagataggtaaaaaagtgcagcgttcagaaataagaaaacccttaagtctgtgcgacacaggcttaagggtttctaccccatccggcgcttatctccggcactctcagtggcttagctcttgaaggggcgataagaataatctcataaagctaacccgccgttttaacacaaactgcgattagtattatttttgaacaatatcaggcggtagataagcagtattaagaaggtcatcgaacctggacggaggttaatccaggtcgatttggcgaacttgcggcattaagtcaggatcaatgcacgcccagacgccaggcaaagtagatttcttcttttaattcagcagaagagagagtaagcaggtcagcaaattcaagttctagttgtttcagacgtttgagatattgggcaggtgaaagattgctctggtcacggcgtaaaaattcaatggccagctgggtgggatcaagttgagtagacatagcatcctcgcttttagacaagacctgcacagtataccaccgtttactgtgcagataatgaccaaaagcaatatgcgtcacacttttctggtgacaacgtcacaaaatggcggtcgtcaatcgtgacgaacagcacaaacgccctttctcatcgaagatttcaatctgccagacctggtgacgcgaaccgagatgcaacggtttgcatacgccgcgcacccgcccttctcgtgccgagcggacgtggttagcattgatttccagaccaaccactttttgctcaccttcggtacataaataaccggcaacggaaccgatactttcggccagtaccacggatgctcctccatgcagcaacccgaaaggctgctttgtccgcgagtctactggcattgtcgcttcaagggtgtcatcaccaatatgttcaaagcgaatatccaggaaccccaccatgtttccttcacccatagcattcagtgcttccagggtgattttccgtttccatatcatttaataatctccagtaaagcctgcacaggatggcgtacccccgtgccttcaatccgttttacctggctacggcaggaatatccggtcgccagacagcggttacgcggcagtcgctgcatagcctgatgccaggataactcatagatcccgagcgaattttcatggtttttcgcttcatgtccgtaagtccctgccatgccgcagcaacccacgctgacattttccagtttcgcgccaaaacgggcaaatatcgcggcccattgtgctggcgcacccggcaaggcggtaacttcggtacagtgaccaaagaaataccatgattcaccgctgactgtagccactggctgtgactcaagtgcgcttgccagccattcattcgccagtaagacgttaaactcgccacgctcctcgcccagcgccagtttatattcatcgcgataacaaagtaccagcgccggatcgacgcccaccattggcatacccagcttcgccatacggttgaggaaatccgccgtctttttcgccgtcttcgcaaaacgattaagaaaacctttaatatgctgggctttgccatttggcgaaaatggcagtaacacaggctggaaacctaatttttcgaccagacggacaaaatccgccaccacttgcgcatcgtaatagctggtaaaggggtcctgcaccaccaacactgtgcgcgctttctgctctgcattgagagattcaagctgttccagcgtcatgtttgccgagcgatgccccaccatttgttgttgtagcgaggggaccgacagcagcggcaaatcaaccatgccgatatgtttttccgagagtttgcgcaccagcggctggttaatgaagaagttaaaggttttcggcgcgcgtgccatcagcggcgcgtagctctcgaccgtagcgacgaggtggtcgcgcagcgggcgtaaataacgggtgtgatagagctgcagaaaacgagagcgaaactccggcacatcaattttgatggggcactgggtcgaacacgctttacaggccagacagcccgacatcgcctctttgacttcgtgtgagaagtcatattcgcctttattcgcatgccagctattgcgcgtgcgggcaattaacgtccgcaaactgacgccggattcaggcagttcttgttccagtttgagtggatcaacgccgcgatccgccaacaaacgcagccattcacgcaccagcgttgcgcgccctttcggtgaatgaatccggttctgggtgatcttcatcgacggacacatcggactacgggcatcaaagttgaagcataaaccgttgccgttacactccatcgcaccgcgccactgctggcgtaccgcaatggggatctgccgatcgaatgtaccgcgcttcaccgcgtccactttcatcatcggcgcatcgagaccttctggcgggcaaatcttccctgggttgagtcggttatgcgggtcaaatgccgctttcactttgcgcagttctgcaaaaagttcctcaccgaaaaacgccgggctgtattcagcgcgaaaacctttgccgtgctcgccccacaacaaaccaccgtatttcgcagtcagcgccaccacgtcatcagagatttgcttcatcaaaatctcttgttgaggatcgcacatatccagcgctggacggacgtgcaagacacctgcgtcgacgtgaccgaacataccgtagcttaagccgtggctgtcgagcagcgcgcgaaattcagcaatataatccgccaggtgttccggcggtacgcaggtatcctcagcaaacggaattggcttagcggcacctttggcattgccaagcagaccaacggcttttttgcgcattgcatagatacgttcaacccccgccagctcacggcacacctgccagccgatgacacctgcttgatgactggcgatcagctcatccaaccgcgcacagagtgcatttacccgctcatcaatcagcgcctcatcatcaccagcaaattccacaatgttcagcccgagcatctcttggtcaggcacatcggtaatcaactcgctgacggaatgccagacaatatcttcccgcgccagattcagcacttttgagtccaccgtctctaccgaaagcgcccgcgcctcaaccataaacggcgcgttacgcagcgcagagtcaaaagagtcatatttgacgttcaccagacggcgcactttaggcaagcgtgtaatatccagccgcgcttcggtaataaaggccagcgtcccttctgaacccgtcagaatgcgcgtcaggtcgaactcggtcatctcatcgttaaagacatgacgcagatcgtaaccggtaagaaagcggttaagtttggggaagttgtcgataattaactggcgttgctgacggcaacgttgataaaccgtgttataaattcgcccgattgtggtattggatttacccagcgtttccgccaattcgacgggtaaaggttgcgtatcgagaatatcgccccccaacaacaccgcgcgtacgccaagtacgtgatctgacgttttgccatagaccagcgatccctgaccggatgcatcggtattgatcatcccaccgagcgttgcccggttgctggtcgaaagttccggcgcaaaaaagtagccgaacggtttcaggtactgattgagttgatcttttatcaccccggcctcaacgcgcacccagccctcttcagggttaatttcgatgatgcggttcatatggcgggacatatcaacaataatcccctggttgagcgcctgaccgttagtgccggtgccgccgccgcggggggtaaagatcagcgatgaatagcgttcctgcgcggcaagacgggcgatcagcgccacatctgcggttgaacgcggaaataccaccgcatcggggagaagttggtaaatactgttgtcggtcgacattgtcagacgatcggcataacttgtcgccgtatcgccggtaaaaccttgttgctccagctcttgcaaaaaattaagcaccagttgaacgacgtcgggtgcctgggaaatctgtggaatcattatattgaccctttcctgcggtctgtgatgtaggtcgatacactattctttcaggctgctgcaatagcgcactgaaaggtgatgtttgtttactctatggatttcgtgttgcaggaaggcggcaagcgagtgaactccaggagcttacaatagtaagtgactggggtgaacgaacgtagccgcagcacatgcaacttgaaatacgacgagtaaatcgtttgcgtgttgcctgagttgttgtaccacatttttttctaacacgcccatcagaattaagggcagaatcggcctgttaaaaaccgctgaaattgctcatcattatgcaggtgagtttcgcgtgttcacgtcgcgtcgacgatttgacgcacaaaaaaggtgaaaagtagttatggtaaatgttcgtcagcccagggatgtcgcacaaattctgctttcggtgctgtttttagccatcatgattgtggcatgtctgtggattgttcaaccctttattctcggctttgcatgggccggtacggtggttatcgccacctggccggtattgttacgtttgcaaaagatcatgtttggccgccgctctctcgccgttctggtgatgacgctgttattagtgatggtgtttatcatccctattgctttgctggttaacagtatcgtcgacggcagcggcccgctaattaaagccatttccagcggtgacatgacgttacccgatctggcgtggcttaataccattccggtgattggcgcgaagctgtatgcaggctggcacaacttgctggatatgggggggacggcgatcatggcgaaagtccgcccttatattggcaccaccaccacctggttcgttgggcaggcggcgcatatcgggcgctttatggtgcattgtgcgctgatgcttctcttcagtgccctgctgtactggcgcggtgaacaggtggcacaaggcattcgccattttgcaacccgtctggcaggcgttcgcggagatgccgccgtgctgctggcggcacaggctatccgcgcggtggcgctgggtgtggtggtgacggcgttagtacaggcagtgcttggcggtatcggcctcgccgtatccggcgtaccttatgcaacgttgctaacggtgttaatgatcctctcctgccttgtccagcttggcccgttgccggtactgattccggcgattatctggctctactggactggcgataccacctggggaacggtattgttagtgtggagcggtgtggttggcacgctggataacgtcatccgcccaatgttaattcgcatgggtgccgatttaccgctgatcctgattctctctggcgttattggtggtttgattgctttcgggatgatcggtctgtttattggtccggttctgttagccgtttcctggcgtctgtttgccgcgtgggtggaagaagtcccgccgccgacggaccaaccggaagaaattctcgaagaacttggcgaaatcgagaaaccgaataagtaatttctcatcaggcggctctgccgcctgattgttaaccaccgctaattgatatttgcttgctcttccccatattttcctgcttaccgccattcagctggtagtacctgtcgcaaattctttacagtttttaaactaatgagacgaatctgatcgacgcaaaaagtccgtatgcctactattagctcacggttataaatcaacatattgatttataagcatggaaatcccctgagtgaaacaacgaattgctgtgtgtagtctttgcccatctcccacgatgggcttttttttaacatttttccgcttcgctacctcgcccctcactctttccaataatgttgcacaagatactgtgactctcttcaagccgtcagcaggctgataatgttatttatattttattgtttatttcatgcagccattacacgatgaacgcttatgaactccaggcactccgccatatttttgccatgactattgatgaatgcgcgacctggattgcccagaccggtgacagtgaaagctggcgtcagtgggaaaatggcaagtgtgccattcctgatcgtgtagtcgagcaactgttggctatgcgtcagcaaagaaaaaaacatcttcatgccatcatagagaaaataaataaccgcatcggcaacaacaccatgcgttttttccccgacttaaccgcatttcaacgagtctaccctgatggcaattttattgactggaagatctatcaatcggtagctgctgaattatatgcacacgatctggagcggctttgttaatttttccacagaaaggaattgtcgttgttacaacaataatgaacggatgctgacacaacatcgcttcactttttaaagcacctttgctaagtagaacctatgaaaaatccctatttccctaccgcacttgggttgtattttaattacctggtgcatggtatgggcgtccttttgatgagcctgaatatggcctcgctggagacactttggcagactaatgccgcgggtgtctcgatagttatctcatcgctgggcattggtcgattaagtgtcttgctttttgcaggattattatccgatcgctttggtcgccgcccttttatcatgctcgggatgtgctgctatatggccttcttttttggcatcctgcagaccaataacatcattatcgcttatgtttttggctttctggcgggaatggcaaacagttttctcgatgcaggcacttatcccagtttgatggaagcttttccacgctcacctgggacagccaatattttaattaaagcatttgtttccagcggacaatttttattaccgctaatcattagcctgttagtgtgggctgaactgtggttcggttggtcctttatgattgctgcaggcattatgtttattaacgctctgtttttataccgttgtacgttcccaccccatccgggtcgtcgcttacctgtcataaagaaaaccaccagctctacggaacatcgctgttcaattatcgatttagccagttataccttatatggctatatctcaatggcaacgttttatctggttagccagtggctggcacagtacggacaatttgttgcaggcatgtcatacactatgtcgatcaaactactcagtatctacaccgtgggttcgctgctttgtgtatttattaccgctccactcattcgtaataccgttcgcccaacaacattactgatgctgtacacctttatctcatttattgctctgtttaccgtctgcctgcatcccacattttatgtggtgataatatttgcttttgtcattggttttacctctgctggaggtgttgtgcaaattggcctgacgttaatggctgaacgtttcccttacgctaaaggtaaagctacagggatctattacagtgcgggcagtattgcgacctttactattccgttgattacggctcatctgtcccaaagaagtattgccgatattatgtggttcgataccgccatcgctgccatcggttttttactggcactgtttatcggcttacgcagccgcaaaaaaacgcggcatcactcgctaaaggaaaatgtcgctccgggtgggtaatgcaatattcttttcaggtcatgcaagatcttacggataaataactctttctgcgctaactaaggaaaatcgcgatcaaaaacaaactatgacatgcaatattcctggaaacataaactttatgccatgtacccagggaaaatcatcttcagtatagtaattatgtaaaccgtcggagaacaatacgtacggtaacgaaattatctttcagcaaggagctgtgaaaatgtctcaaaataaggctttcagcacgccatttatcctggctgttctttgtatttacttcagctacttcctgcacggcattagtgttattacgcttgcccaaaatatgtcatctctggcggaaaagttttccactgacaacgcgggcattgcctacttaatttccggtatcggtttggggcgattgatcagtattttattcttcggtgtgatctccgataagtttggtcgtcgggcggtgatattaatggcagtaataatgtatctgctattcttctttggtattcccgcttgcccgaatttaactctcgcctacggtctggcagtgtgcgtaggtatcgctaactcagcgctggatacgggtggctaccccgcgctcatggaatgctttccgaaagcctctggttcggcggtcatactggttaaagcgatggtgtcatttgggcaaatgttctacccaatgctggtgagctatatgttgctcaataatatctggtacggctatgggctgattattccgggtattctatttgtactgatcacgctgatgctgttgaaaagcaaattccccagccagttggtggacgccagcgtaactaatgaattaccgcaaatgaacagcaaaccgttagtctggctggaaggtgtttcatcggtactgttcggtgtagccgcattctcgaccttttatgtgattgtggtgtggatgcccaaatatgcgatggcttttgctggtatgtcagaagctgaggcattaaaaaccatctcttattacagtatgggctcgttggtctgtgtctttatttttgccgcactactgaaaaaaatggtccggcccatctgggctaatgtatttaactctgcactggcaacaataacagcagccattatctacctgtacccttctccactggtgtgcaatgccggagcctttgttatcggtttctcagcagctggcggcattttacagctcggcgtttcggtcatgtcagagttttttcccaaaagcaaagccaaagtcaccagtatttatatgatgatgggtggactggctaactttgttattccactgattaccggttatctgtcgaacatcggcctgcaatatatcattgttctcgattttactttcgcgctgctggccctgattaccgcaattattgtttttatccgctattaccgcgttttcattattcctgaaaatgatgtgcggtttggcgagcgtaaattttgcacccggttaaacacaattaagcatagaggttaaaggagttaattatggatgttaccgcaaaatacgaattgattgggttgatggcctatcctatccgccacagtttatcgcccgaaatgcagaataaagccttagaaaaagcgggattgccatttacctatatggccttcgaagtggataacgatagctttcctggagcaattgaaggattaaaagccctcaaaatgcgcggaactggtgtatcgatgccgaacaaacaactggcgtgtgaatatgttgatgaattaacaccagctgccaaactggtgggggccatcaacaccatcgttaatgatgatggctatctgcgtggctataacaccgacggcacgggccatattcgcgccattaaagagagcggttttgatatcaaaggcaaaacgatggtgctgttaggggccggtggtgcctcaacggcaattggcgcgcagggggcaattgaaggtttaaaagaaattaaactctttaaccgtcgggatgagttcttcgataaagccctcgccttcgcgcagcgggttaatgaaaacaccgattgtgtcgtcacggtcaccgatctcgccgatcagcaagcctttgctgaagccctggcttccgccgacattttaaccaatggcacaaaagtgggtatgaaaccccttgagaatgaatcattggttaatgatatcagtctgttacatccgggacttctggtcactgaatgcgtgtataacccgcatatgacgaagttattgcagcaggcgcaacaagctggttgcaaaacgattgatggatacggcatgttgttgtggcaaggggctgaacagttcacattatggactggcaaagatttccctctggaatatgttaaacaggtcatggggttcggtgcctgacaggctgaccgcgtgcagaaagggtaaaaaatgaaaaccgtaactgtaaaagatctcgtcattggtacgggcgcacctaaaatcatcgtctcgctgatggcgaaagatatcgccagcgtgaaatccgaagctctcgcctatcgtgaagcggactttgatattctggaatggcgtgtggaccactatgccgacctctccaatgtggagtctgtcatggcggcagcaaaaattctccgtgagaccatgccagaaaaaccgctgctgtttaccttccgcagtgccaaagaaggcggcgagcaggcgatttccaccgaggcttatattgcactcaatcgtgcagccatcgacagcggcctggttgatatgatcgatctggagttatttaccggtgatgatcaggttaaagaaaccgtcgcctacgcccacgcgcatgatgtgaaagtagtcatgtccaaccatgacttccataaaacgccggaagccgaagaaatcattgcccgtctgcgcaaaatgcaatccttcgacgccgatattcctaagattgcgctgatgccgcaaagtaccagcgatgtgctgacgttgcttgccgcgaccctggagatgcaggagcagtatgccgatcgtccaattatcacgatgtcgatggcaaaaactggcgtaatttctcgtctggctggtgaagtatttggctcggcggcaacttttggtgcggtaaaaaaagcgtctgcgccagggcaaatctcggtaaatgatttgcgcacggtattaactattttacaccaggcataagcaataatatttcggcgggaacaccctccccgccgaactaaaaaatatattcaatcgtatttaataaaaatatttcgtgagtctctgtgcgctaattctccatttggcgtagggaaaatcacatctgaatcaggaattaacaatgaaacctgtaaaaccacctcgtattaatggacgagtgccggtcctgtcggcacaggaagcggtgaattatattcccgacgaagcaacactttgtgtgttaggcgctggcggcggtattctggaagccaccacgttaattactgctcttgctgataaatataaacagactcaaacaccacgtaatttatcgattattagtccaacagggcttggcgatcgcgccgaccgtggtattagtcctctggcgcaagaaggtctggtgaaatgggcattatgtggtcactggggacaatcgccgcgtatttctgaactcgcagaacaaaataaaattattgcttataactacccacaaggtgtacttacacaaaccttacgcgccgccgcagcccaccagcctggtattattagtgatattggcatcgggacatttgtcgatccacgccagcaaggcggcaaactgaatgaagtcactaaagaagacctgattaaactggtcgagtttgataacaaagaatatctctattacaaagcgattgcgccagatattgccttcattcgcgctaccacctgcgacagtgaaggctacgccacttttgaagatgaggtgatgtatctcgacgcattggttattgcccaggcggtgcacaataacggcggtattgtgatgatgcaggtgcagaaaatggttaagaaagccacgctgcatcctaaatctgtccgtattccgggttatctggtggatattgtggtggtcgatccggatcaaacccaactgtatggcggtgcaccggttaaccgctttatttctggtgacttcacccttgatgacagtaccaaacttagcctgcccctaaaccaacgtaaattagttgcgcggcgcgcattattcgaaatgcgtaaaggcgcggtggggaatgtcggcgtcggtattgctgacggcattggcctggtcgcccgagaagaaggttgtgctgatgactttattctgacggtagaaacaggtccgattggcggaattacttcacaggggatcgcctttggcgcgaacgtgaatacccgtgccattctggatatgacgtcccagtttgatttttatcacggtggcggtctggatgtttgttatttgagttttgctgaagtcgaccagcacggtaacgtcggcgtgcataaattcaatggtaaaatcatgggcaccggtggatttattgatatcagtgccacttcgaagaaaatcattttctgcggcacattaactgcgggcagtttaaaaacagaaattaccgacggcaaattaaatatcgtccaggaaggacgggtgaagaaatttattcgggaactaccggaaattactttcagcggaaaaatcgctctcgagcgagggctggatgttcgttatatcactgagcgcgcagtattcacgctgaaagaagacggcctgcatttaatcgaaatcgcccctggcgtcgatttacaaaaagatattctcgacaaaatggatttcaccccagtgatttcgccagaactcaaactgatggacgaaagattatttatcgatgcggcgatgggttttgtcctgcctgaagcggctcattaacaggagtataatgatggatttttctttaactgaagaacaagaactgctgctggccagtattcgcgaactgattacgactaactttccggaagagtatttccgcacctgcgatcaaaacgggacatatccgcgtgagtttatgcgggcgctggcggataacggtatttccatgcttggcgtgccggaagaatttggtggtatccctgcggattacgtcacccaaatgctggcgctgatggaagtgtcaaaatgcggtgctccggcatttttaattaccaacggtcaatgtattcacagtatgcgccgtttcggttctgcagagcagctacgtaaaacggcagagagcaccctggaaacgggtgatcccgcctatgccctggcgttgacggaaccaggtgctggctcagataacaacagtgccactaccacttacacgcgtaaaaacggcaaggtctacatcaacggacaaaaaacctttattaccggtgcgaaagagtacccgtatatgctggtgctggcgcgcgatccgcaaccgaaagatcccaaaaaagccttcaccctgtggtgggtcgactccagtaagcccggcattaagattaacccgctgcataaaatcggctggcatatgctcagcacctgcgaagtctatctcgacaacgtggaggttgaagagagcgacatggtgggcgaagaaggaatgggtttcctcaatgtgatgtacaactttgagatggagcgcctgatcaacgccgcgcgcagcaccggctttgccgaatgcgcctttgaagatgccgcccgctatgccaaccaacgtatcgcttttggtaagcccattggtcataaccagatgatccaggaaaaactggcgctgatggcgattaagatcgacaacatgcgcaacatggtgctgaaagtggcatggcaagccgatcagcatcagtcactgcgcaccagcgcggcgctggcaaaactgtactgtgcacgtaccgcaatggaagtcattgatgatgcgattcaaatcatgggcggtctgggctataccgatgaggcgcgcgtctcccgcttctggcgtgatgtccgttgtgaacgtatcggcggcggtacagacgaaattatgatttacgtagcaggtcggcagatcctgaaagactatcagaacaaataatctgcaggcggcgcagcttcttaacaaactgcgccgccagatttatccaacaagacttaccggttgaggaaattcagataggatttcttgttccgcaaaacagtttttaaattgtctacggtaatcgctgggcgaacaaccgacatggcgcaaaaacagtttggcaaagtgatcgacattttcataacccacacgccaggagatctctgcctgtgataattcagtattagtgagtgaccattttgcttccgtcatacgccgttgaataacatagttaataggggaaatacgatactctttggtaaattcatggcaaatataactgacgctggcacgaaattttttcgataactgttctaaagtgattttttcgcgataattattattcagatagaaaagaatatcttttatcagaacatcttttttaatatacccctgctccgaacgataagcatttttaaaattttcgtagtaaagaatggctaacgtataggcaaatgcatcccataacgaagatgtttggctatttttactttgcggcaaaatcacacttagctcattaaataaggtttttatgacttcttttccctgccccgcggcaattaccggacaagaatgcggttgcagtagctgattttcctcagccccctgaaactgaaagccgtacagcgcacaggtacacgtcgttgccggatcgttaacgtcagaggccaccgcatgcagcctgccgcgttctatcaccacaatgtcatccgcatgtgcgacatataacgaagaatcgatggtaaaccttgcaacccctttcttgacgtaaatcaactcggtttcattgtcatgaacgtgatgtccggactcccattttggatcatcgctaaatgcaaaacgtgaaagccgtggcgttttaccggcgacaaacagcgtttcactggcgttatcaaaacagcgttgatacatgacaacctccctattccatgagcaagcaaaaacaatatatgccggataaaatacggcgtgtattgcggttatacaaccgcgtttagcgagagctaaacaagattatttacactgaatgcaagattgtacggtcatggaataactatattgccgcaaattgcacttttgttttagcgatcgcattttttttgcaagattgttggcaaggaaaacagcttgctccgtcgaaaaccccgcaccgctatcgcacactattttcaggccatttttaccttccatcggagatggttccgtatgcgactcacaggagaaatcatgaaaataataacctgctttaagctggtgcctgaagaacaggacattgttgtcactccagaatacaccctgaatttcgacaatgccgacgccaaaatcagccagttcgatctcaatgccattgaagctgcaagccagctcgcaacagatgacgatgagatagccgcgctgaccgttggcggctcattgttgcagaactcgaaagtgcgcaaagacgtgctatcccgcgggccgcacagcctgtatttggtgcaggatgcgcaacttgaacatgcactgcctctcgataccgcaaaagcgctggcggcagcaattgaaaagatcggcttcgatttactgatctttggtgaaggttccggcgacctttatgcccagcaggttggcttgctggtcggagaaattctgcaacttccggtgattaatgcagtgagtgctattcagcgtcagggcaatacactggtgattgaacgcacgcttgaagatgatgttgaagttattgaactctctgttccagccgtgctctgcgtcacctccgatattaacgtgccacgcattccttcgatgaaagccattctcggcgcgggtaaaaaaccggtaaatcagtggcaggcaagtgatattgactggagccagagcgcgccacttgctgaactggtcggcattcgcgtaccgccgcaaacagaacgtaagcacatcattatcgataacgattcgccggaggccattgccgagctggcggaacatctgaagaaagccctgaactgaagcctacggagaagaaacgatgagtcaattaaacagcgtctgggtctttagcgataatcctgaacgttatgctgaactgtttggcggcgctcagcaatggggccaacaggtgtatgccattgtacaaaataccgaccaggcgcaggcagttatgccttatggtccaaaatgtctttatgttcttgcgcaaaacgacgcgctgcaacgcactgaaaattacgccgaaagcattgctgccctgctgaaagataaacaccccgctatgttgctgttggccgcgacgaaacgtggtaaagcgctggcagcacggttaagtgtgcaactgaatgcggcgctggtgaacgatgccacggcggtggatattgtcgatggtcacatttgcgccgaacaccggatgtatggcgggttagcgttcgctcaggaaaagatcaacagcccgctggcgatcattacccttgcacccggtgttcaggaaccgtgcaccagtgatacctctcatcagtgcccgacagaaacggtaccttatgttgctccgcgtcatgaaattctctgtcgcgaacgccgtgcgaaagccgcaagcagcgtggacctgagcaaagcaaaacgtgtggttggcgtcggtcgtggactggcggcgcaggatgacctaaaaatggtccacgaactggcggcggtgctgaatgctgaagtcggctgttcacgtccaattgccgaaggcgagaactggatggagcgtgaacgttatatcggtgtctccggcgtgttgctgaaatccgatctctacctgacgctggggatctccgggcagatccagcatatggttggcggcaacggcgcaaaagtgattgtcgccatcaataaagataaaaatgcgccaatcttcaactatgccgactacggtctggtgggcgatatctacaaagtcgtccctgccctgattagccagttgagccgctaattcccctttcaaccacatctcccgctgtaaacgcagcgggaagggagcataacgcatgtcggatgacaaatttgatgccattgtggtcggtgcgggcgttgctggtagcgttgccgcactggtcatggcacgagccgggctggatgtcctggtgatagaacgcggcgacagtgccggatgtaaaaacatgaccggcgggcgtctttatgcccacacacttgaagcaatcattccaggctttgcagtatcagcgccggtagaacgcaaggtcacacgcgagaaaatctccttcttaaccgaagaaagcgccgttaccctcgattttcaccgcgagcagccagatgttccgcaacacgcatcttataccgtattgcgtaatcgtctggacccgtggttgatggaacaagccgagcaggcgggcgcgcagtttatcccaggcgttcgcgtcgacgcgctggttcgtgaaggaaacaaggtcactggcgtgcaggctggggatgatattctcgaagcgaatgtggtgattctggctgatggcgttaactcgatgcttggccgctcgctgggaatggttcccgcttccgatccgcatcattacgctgttggtgttaaagaggttattggcctcacaccagaacagatcaacgatcgctttaatattacgggcgaggaaggtgccgcctggctgtttgccggttccccttctgacggcctgatgggcgggggatttctctataccaacaaggattccatatccttggggctggtttgtggattgggtgatatcgcccatgcgcaaaaaagcgtgccgcaaatgctggaagattttaaacaacaccccgccattcgcccgctgattagcggcggcaaactgcttgaatattccgcgcatatggtgccggaaggcggtctggcaatggtgccgcaactggttaacgagggcgtgatgatcgttggtgacgccgcaggcttctgcctgaatttgggttttacggtccgcggcatggatttagccattgcatcggctcaggctgccgccacaacggtgatcgccgccaaagaacgcgcggatttctccgccagcagtctggcgcaatacaaacgtgagctggaacaaagctgcgtcatgcgtgatatgcagcattttcgcaagatcccggcgctgatggaaaacccgcgcctgtttagccaatacccacgaatggtagccgacatcatgaacgagatgttcaccatcgacggcaaaccaaaccagccggtacgaaaaatgatcatgggacatgcgaagaaaattgggctgatcaacttgctgaaagatggcattaagggagcaaccgcgctatgagccagaacgctacggttaacgtcgacatcaaattaggcgtcaataaattccatgttgatgagggccacccgcatatcattctggcggaaaatcccgatatcaatgaattccataaattaatgaaagcctgccctgccggactttataagcaggatgacgcaggaaacattcattttgattccgccggttgtctggagtgcggcacctgtcgggtgctgtgcggtaacactattctcgaacagtggcaatatcccgcaggcaccttcggtattgattttcgctacggctaatcatgcatcccacaggcccgcatctcgggcctgatgttctgtttcgagagtccaacatgaaagtgacattaacgtttaacgaacaacgtcgtgcggcgtatcgtcagcaagggttatggggcgatgcttcgctggccgattactggcagcagaccgctcgtgcgatgccagacaaaattgccgtggtcgataatcatggtgcatcgtacacctatagcgcgctcgatcacgccgcgagctgtctggcaaactggatgttagcgaagggtattgaatcaggcgatcgcatcgcatttcaactgcctggctggtgtgaatttaccgttatctatcttgcctgcctgaaaatcggtgcagtttccgtgccgctgttgccttcctggcgggaagcagaactggtgtgggtgctcaataagtgtcaggcaaaaatgttctttgcaccgacgttgtttaaacaaacgcgtccggtagatttaatcctgccgctgcaaaatcagcttccacaactacaacaaattgtcggcgtggacaaactggctcccgccacctcttccctctcattaagtcagattatcgccgacaatacctcactgaccacggcgataacgacccacggcgatgaattagctgcggtgctgtttacctccggaaccgagggtctgccaaagggcgtgatgctaacgcataacaatattctcgccagtgagcgggcttattgcgcgcgactgaatctgacctggcaggatgtctttatgatgcctgcgccacttggtcacgcaacgggctttctgcatggcgtaacggcaccattcttaattggcgctcgcagcgtgttgttagatattttcactcctgatgcgtgtctcgcgctgcttgagcagcagcgttgcacctgtatgctcggcgcaacgccgtttgtctatgatcttttgaatgtactagagaaacaacccgcggacctttcagcgctgcgtttctttctttgcggcggaaccacaatccccaaaaaagtggcgcgtgaatgccagcagcgcggcattaaattattaagtgtttatggttccacagaaagttcgccgcatgcggtggtgaatctcgatgatcctttgtcgcgctttatgcacacagatggttacgctgccgcaggtgtagagattaaagtggtcgatgacgcacgcaagaccttaccgccaggttgcgaaggtgaagaagcctcgcgtggccccaatgtgtttatggggtattttgatgaacctgaattaaccgcccgtgccctggatgaagaaggctggtattacagcggcgatctctgccgtatggatgaggctggctatataaaaattaccggacgcaaaaaagatattattgtccgcggcggcgaaaatattagcagccgtgaagtggaagatattttattgcagcatcctaaaattcacgatgcctgtgtggttgcaatgtccgatgaacgtttaggtgaacgatcatgcgcttatgtcgtgctgaaagcgccgcatcattcattatcgctggaagaggtagtggctttttttagccgtaaacgggtcgcaaaatataaatatcctgaacatatcgtggtaatcgaaaaactaccgcgaactacctcaggtaaaatacaaaagtttttgttaagaaaagatattatgcggcgtttaacgcaggatgtctgtgaagagattgaataagtttcatcttcggggatcacataaccccggcgactaaacgccgccggggatttattttatttcttcagttcagccaggcttaaccaggtttgcaccacggtgtccgggttcagagacaggctatcgatcccctcttccatcaaccatgcggcaaagtcttcgtggtcggacggaccctgaccgcaaatcccgacatatttgccctgtttcttcgcggcacggatagccatcgacagcagtgctttcaccgcatcgttgcgctcatcgaacaattcagacaccacgccggagtcacggtccagaccgagcgccagctgcgtcatatcgtttgagccaattgagaagccgtcgaaatattcgaggaactgctcggccagcaaggcgttggacgggatttcacacatcatgatgattttcagcccgttctcgccacgtttcagcccctgacgcgccagttcttcaaccaccgctttcgcctgatctacggtacgcacgaacgggatcatgatctcaacgttggtcagtcccatgtcgttgcgcacacgtttcactgcttcacactccagcgcgaaacagtcgcggaagctgtcggaaacatagcggcccgcgccacggaagccgagcatcgggttctcttcatctggctcgtaacgctcaccaccgaccaggttggcatattcgttcgatttaaaatcagagagacggacaatgacgcgcttcggataaaacgcggcacccagcgtcgcgatcccttcagtcagacgaccaacgtaaaattcacgcggagaatcaaaacctttcatcatctcgcggatttcgttttgcaactgcggttcctgatcgtcaaactcaagcagtgcgcgtgggtggacgccaatcatacggttgatgataaattccagacgcgcaaggcccacgccttcgttcggtaggcaggcgaagtcgaaagcacggtccgggttaccgacgttcatcatcactttcaacggcagatccggcatcgtttctacgctggagcttttcacgctaaattccagcaactccgcatagacgtaaccggtatcaccttcggcacaagaaacagtgacgttctcaccgtctttcatccgttctgttgcatctccacagcccactaccgccggaatgcccagttcacgagcgatgatcgccgcgtgacaggtacgaccgccacggttggtgacgatggcagatgctttcttcatgatcggttcccagtccgggtcggtcatgtcagtaaccagcacgtcgccaggttcgatgcggttcatttcgctgatgtcatggatgactttcaccggacccgcaccgatgcgatgaccgatagcacggccttcggcgataatcttaccctgtgaatgcagcgtataacgctccatgacctgaccgcgtgagcgcacggtttccggacgcgcctgcacaatgaacagtttaccggtgtggccatctttcgcccactcaatatccatcgggcgaccgtagtgtttctcaatttgtacggcctgttttgccagttcctgcacttcttcgttggtcagcgagaagatgtcacgctgttcctgcggtacgtcttcgattttaacctgcttgccgtgctcctgggtcggcgcgtaaaccatgcggatttttttcgaccccatggtgcggcgcacgatagccgggcgattcgccgccagtgtcggtttatgcacgtaaaactcatccgggttaaccgcaccctgcacgaccatctcaccaaggccccatgcggaagtgataaacaccacctggtcaaagccggattcggtatcaatggagaacatcacgccagatgatgcgaggtcagagcgcaccatccgttgaacaccggcggagagcgccacaccacggtgatcgtaaccctggtgcacacgataagagatggcgcgatcgttaaacagagaagcaaatacatgtttcactgccacgagaacggcgtcaaaaccctgaacgttgaggaaggtttcctgctgaccggcaaaagaagcgtccggcatatcttctgcggtggcggaggagcgcaccgcaaaagaggcgttttcgtcatcggcggaaagctgtgcataggcttcgcggatggcgttttccagctcaggctggaagggagtgtcgataatccactggcggatttgcgcgcccgctttcgcaagctgagtaacatcgtcaatatccgttttatccagcagttcataaatgcgctggtttacgccgctttggtccagaaactggttaaacgcgtcggcggttgtggcgaaaccattcggaacggaaacacccattccggaaagattagtaatcatttcacccagggaggcatttttgcccccaaccctgtctacatcattcatgccgagttggttataccaaagcaccagcggtgacgagccattgttggacatcgaacaatccttttgtgataaatgaacggtttgagaaacacatttctgcgcatttatctttgcatatttaaccggatgaaaaaaacggtgaatcgttcaagcaaatatatttttttactttttaagactgatcccagcgttgcgcaaatctgctctcttcgacaatttccacataaaccatcggtataaacgaaaccataaaaatgaaatgctgttttcataaaaaataaaattgaaggttcattttataaaccagacataacgttctacgcttctgtgcgtttttaatttatgctttcatagaattatgtctgcatcacgggaagaacaaaatggataatgctgttgatcgccacgttttttatatttctgatggtacggcaataactgcggaggtattaggacacgcagtaatgtcacaatttcccgtcactatcagcagcatcacgctgccgtttgtcgaaaatgagagccgtgcacgggcagtgaaggatcagattgacgcaatttatcaccagacaggcgtgcgcccgctggtcttctactccatcgtgttgccggagattcgcgccatcatcttgcaaagtgaaggcttttgccaggatatcgttcaggcgctggttgccccgctacaacaagagatgaaactggatccaacgccgattgctcatcgtacccatggccttaaccctaataatctcaataaatatgatgcgcgcattgcggcgattgattacaccctcgcccacgatgacggcatttcgttgcgcaatctggaccaggctcaggtgatcctgctcggtgtttctcgctgtggtaaaacccccaccagtctgtatctggcaatgcagtttggtatccgcgcggcaaactacccctttattgccgacgatatggataatctggtgctacccgcgtcgctcaaaccgcttcagcataaattgttcggcctgactatcgacccggaacgtctggcggcgattcgcgaggaacgtcgggagaacagtcgctatgcctcgcttcgtcagtgcaggatggaagtcgcggaagtggaagccttgtaccgtaaaaatcagatcccgtggattaacagtaccaattattcggtagaagagattgccaccaagatcctcgatatcatgggccttagtcgccgaatgtactagagaactagtgcattagcttatttttttgttatcatgctaaccacccggcgaggtgtgacacacctcgcacttgaaatcagcagcgattggtttatcgtgatgcgcatcacttcccggcagtcctgccgtagaagcaacaaatttctgagacttgtaatgaacagaactgacgaactccgtactgcgcgtattgagagcctggtaacgcccgccgaactcgcgctacggtatcccgtaacgcctggcgtcgccacccatgtcaccgactcccgccgcagaattgaaaaaatactgaatggtgaagataagcgactgttggtcattattggcccctgctcgatccacgatctcaccgctgcaatggagtacgccacccgtctgcagtcgctgcgcaaccagtaccagtcacggctggaaatcgtaatgcgcacctattttgaaaaaccacgaactgttgtcggctggaaaggactaatctccgatccagatttaaacggcagctatcgggtaaatcacggtctggagctggcgcgcaaattacttttacaggtaaatgagctgggcgtcccaaccgcgaccgagttcctcgatatggtgaccggtcagtttattgctgatttaatcagttggggcgcgattggcgcacgtactaccgaaagtcagatccaccgcgaaatggcttcggcactctcctgtccggtaggttttaaaaatggtaccgatggcaatacgcggattgctgtggatgctatccgcgcagcccgcgccagccatatgttcctctcgccagacaaaaatggtcagatgaccatctatcagaccagcggcaacccgtatggccacattattatgcgtggcggcaaaaaaccgaattatcatgccgatgatatcgccgcagcctgcgatacgctgcacgagtttgatttacctgaacatctggtggtggatttcagccacggtaactgccagaagcagcaccgtcgccagttagaagtttgtgaggatatttgtcagcaaatccgcaatggctctacggcgattgctggaattatggcggaaagtttcctgcgcgaaggaacgcaaaaaatcgtcggcagtcagccgctcacttacggtcaatccattaccgacccgtgtctgggctgggaggataccgaacgcctggtcgaaaaactcgcctctgcggtagatacccgcttctgaatgcgtgcccattcctgacggaatgggcatttctgcgcaacttgttgtcttctcaacaaattactgcttgctctggtcagccataatattgataataagaatcattgttatatcaattattattaatttttatgcgttatacggatagcagaaaactcacgcctgaaacggatgccaatcacaagaccgcttccccgcagcctattcggcgaatttccagccagacactgttaggtccggatggcaaactgattatcgatcatgacgggcaagaatatctgctccgtaaaactcaggctggcaagctgctgttgaccaagtagcctttaactcgagcagctgacttccagccgtttaccccagtcaggtggacgactgacatagtcatcatctctgtcgctgaaaggatttcgcaacgcctcatgcaggcggtgcaattccgtcatatcacccttttctgccgcttcaatcgcccgttgcgccaaccagttgcgcaataccagagcggggttaacgctttgcatcagttgctgacgctcactatcgctaacctcgtcttgttgcaaacgcccccgataacgggcaaaccagtcatcaaatgccgcacgatcaataaactcatcacgtagcggtgacgccgcgctgtgctgctcggtcagactcagcatgcggaatgtgcgggtataatcgctgcgctctcgcgccatcagactgaataattcattcagtagcgcgttatcctctttttgctccgtcatgaagcccagtttctgccgcatccgttctccataatgcgtcaacaaaacctgctgatagctgtccagggcctcattcagggcatctacggcaacaaatggcgacaatgtctgcgccagacgctgtaaattccacaacgcgacggcaggttgattatcaaagctgtaacgcccttgatgatccgagtgattacaaataaaaccgggttcgtaatcatcaagaaaaccaaacggcccgtaatcaagcgtcagccccagcagcgacatgttgtcggtattcatcaccccatgagcaaagccgaccgtctgccattgggcaattaacgacgcggtacgtgcgacaacatcgctaaaccagagacggtatttgtcctcatcatctgcaagatgtgaccagtaatgacgaatagcaaagtcagctaactgacgaaccttttccgactcgcggcggtagtaaaaatgttcgaaatgaccaaagcgcagatgacttggtgccacacgcatcagcatcgcgcctggctccgccgtttcccgatacactggcgaatcgctggtgacgatacttaacgcgcgggtcgtcggaatgcccagataatgcatcgcctcactggcgagactttctcgtatcgtcgaacgtaaaaccgcccgtccatcacccattcgcgaataaggcgtcaggccagcacctttcagatgccagtccattgtagtgccatcagcaagcagttgttcgccgagtaaaatgccgcgcccatcacccagttggcccgcccagacgccgaactgatgaccactgtaaacctgcgccagtggtgacataccaggcagtagggcttcgccgccccagacacctgcgccatttttaaacagcgacgatggaatactcagcgtgttagccagttcggtattatgccaaatcagccgggcattatttaaaggcgtaggggaaagtgctgtataggtttctggcaattcatcgcgccagcgggtaacaaaagacagggtcatagatcctcctgtttgatagtgtagacggttactctcgtcttaaacaccagcaaacagaagggttatcgctgaaccaacgtcgttatctgatttatgggaacggcaggccacaggcatccctggagagcatggaaatcgaagggggtaatctgtgccaatatttctgccgtatcaatgcctcccgcaatgatgcaattgcaacaaggggaaatttgcgcctggatcgcacgaataaacggttcgaaggagcggtgcgtgatttgttgctgaataaaacttttatccagcatgacgcgggtgaaaagaccatcaaaaaccgctttcattgtgctattgcctgctcccaaattacctaacacaaggggatacacttgcgataaggataaaagaccgcgattatcttttccttcattgagatgcgggtaattctcattaatcaacagttcaataaacggatattttaatagttcgcctgcgtaattatccctctctaataataatgtagccacttgtggcgttaaattaagccaggcaaagagtttatgttgaataaaaaaatgttggcatgattttagtaattccaactgctctgaaaataattgccaatgttgctcctcggtaagttgcgctataacccgactcgtcgggatacgaaccgtaccatcttcactggagaaatgggtaattaactcaacgccgacaaggacttgctggttgtctcttatcggcaggaaatagcaatcagaatgataaagattctccaaaaaaatcttcatggtaaccgtccctctcgaaggatgtttttcagtatccggctaaaagggatgaggccataagacataacaattacagaaggagtaactttcatttgttccatgttaaccactttttcaggggtcctttttttagattatcctgattataaacgaataatccatttacggaatttttgtctgcaaaatactactgtattcaggagtaaatggacggcgatgtatcatcgccgtccatttttcgacatactagattcgtctcgcctgccagaaatttttctgccaatagacattatcaagtgaggaacgcatcactcccttgctggtagaggcgtggataaattggttgttggtatcgtaaatacctacatgcaaaccattttgtccggaccccgttttgaaaaagaccaggtcacctggcagcaactcgtctttatcaatttgcgtgccaatagaggcttgttgtttggtttcacggggcagctgcaaatcgaaacgatcgcgcatcgtcacaaccacaaatcccgaacagtccacaccgcgccgcgtcatgccaccataacgatacggcgtgccatgccagctttgtagctggtcgttcaaaccggcaataacggtaatcgaatcagaaagtctggcatttggcggcggtgctttatggtggctacacccggccagaagcagtgctgtgatcaaaataaggcagaaacgcattccgtacggttcctctgttttttattcttgcattaatttagcgtcgtaattacccgattttcaagatactaatgaaatcagatggtcgaaatcagcattctgtgaccttcgatatccagacggcgaaaattcatcccataggcctgcgccagatttggcggcgtgagcacctcttccctgcgtccactggccagcatttttccaccttttagcaaccacgcccgatgcgcatgacgcaatgtgtggttgagatcgtgactgctcatcacaatcgccagtccttgctgacacagcgcgctcagaattttgtctaacgcactttgttgcgcaacatcaagactgttcatcggctcatcaagaagcagcaattggcctgcgggattggcttgtggtgtgatttgcaacaccaccgcagcaagacgtacgcgttgccattcaccgccggaaagttgattggtgctacgtccgagtttgtcatcaagagccagcgcccccgcgacatcattcagtagttcggtacgcgttttatcgtgctgatgcagtgtcaggtagtgccagaccggcattgcaaacggcggcgtctgctgttgtgaaagataggcgcgatgcagcgcgagttttgttgcggaccatgcttccagtggttgccccgcgaactgaatgcttcccttaccgctggtcattccggccattcgcgccagtaaggtactcttacccgcgccattcggccccaccaggtgcaggatctccccagcccgaacctcgccagaaagcggccccaggcgggtagattccgcaacatcttgtaactgcatcacaatagacattattttgccaacgccagtttaatgctttccatcacaatgggatcttccggcgtcatatccggggaaaaacgctggatgacttttccgtccctgccaaccaggaatttttcaaaattccataaaatatcatccgggtacagcggtgcacggcctttgctgaccatacgggcatagaatccgctctcttccggcgcgactgcggtcggcgctgcggcaatcaatttttgatacagcggatggcgtccttcgccattaacttcaatcttactgaacatcgggaacgtcaccccccatgtggtggtacagtaagttttaatctcttcatcgctgcccggttcttgttccagaaactggttgcacgggaatcccagcaccataaaacctcgatcgacccaggctttctgaatattctccaactgctcatattgcggcgttaagccacactttgaggcgacattgacaatcaacagcacattaccggcgaacttctccagcgtggtcacttcaccgtcgatatctttcactacggtcgtcagaatggaatcttgcatcgtttctcctgggtgtggtcagtaaaaatcttagcttttaatcatagaccgtctttttgcggctaacgtcctgcttttaacaataaccagataaacaccggcgcacctaacgttgcggtgaccacgccaataggcagctctgcggcagctaatgccaggcgcgctacaatatcggccagcagcaatgcgctcgcccctgccagcgcgcagccgggaagtaatacgcgatgatcggttaaaccacacaaccggagaatatgggggatcaccagaccaataaagccgatagcacccgccagcgccacactgacgccaaccatccagccggtcgctgccaccagcacattgcgccagaaccacaggggtaaacccagttgccgcgccgagatctcgccaagtgctaacatattcatcggcctggactgacaacagatccacaacaacacggggatcaatgccagcatcagccagctttgccgccagtctacgccgccaaaaccgcccatcatccagtacatcagctgacgcaaatcaactgaggtggaaaagtagatagcccacgtcattagtgcgctacagataatccctaatgcaacgccagccagcaataaccgactggtcgaaagatgacgacgggcgaaacgtaagagtattaaagtgatgataagcgcgccagcaatcgcacacagccctagcgcccagttggggagttgcccttgcccaagcaataccgcggcgataagccccacgcctgcgccgttagagacgccaagtagtccaggttctgccagaggattttcaaacaacgcctgcattacagcgccggatatagccagcgccgcaccaaccagcaatacagccagcgtacgtggcaggcgaatttgccagacgaacagttcgccacgaggagtaaaccagtcacctggcgagatccattgttcaccggcgcaaaggcttaagagaagcgccagcagcatcaaaactgacaggcataataaccagcgaatattttgtcgctgttgttggcgggcaagtgtcagcatggtatccgttctgctgaagtgtcatggcgttgattttacggtgactcttcgacagtgaaaagaaaaaaggccgcagagcggcctttttagttagatcagattactcgtctttgggcgaagcgttttcgacccggctttttaacttctgcccgggtctgaaggtcaccacgcgccgtgctgtaatgggaatatcctcgcccgttttcgggttacgtcccgggcgttgattcttatcacgcagatcgaagttaccaaaaccagagagtttcacctgttcgccgttttccagagcgcgacggatctcttcgaaaaacagttcaaccagttctttggcatcccgcttgctaagcccaagcttatcaaacagatattctgacatttcagcttttgtaagcgccataggttcaatccctcaatgatgcctggaatcgctcttttaatgcctctacacatttggcgacggtagcggcaatctcctcttcttcgagtgtacggctggtatcttgcaggatcaggcttatggcgaggctcttatacccctccgcaacacccttaccgcggtacacgtcaaataagtttacgccaactacctgatttacgccaactttcttacattcggataaaatatccgctgcgggaacgttttctgcgaccaccaccgcgatgtcacgacggttcgccgggaagcgagaaatctcgcgcgcctgaggcaccacgcggtctgcgagcttgttccactccagttcgaacaccagagtgcgaccgttaagatccagtttacgttccagttcaggatgaacaaccccaacaaaaccaatacgttcacctttcagataaatcgctgcggattgccccggatgcagtgccggattcgcttctgcacggaactcaacctcattcagtttaccggtcaggtcgagaacggattcaagatcgcctttcaaatcatagaaatcaacggtctcttttgccaggttccagtgctcttcgtaacggttaccgcaaatcacaccggctaacatcagatcctgacgaatgcccaacggtgcctgagtatctggtacgaaacgcagaccgctttcgaaaatgcgcacacggttctgctgacggttctggttgtacaccacggttgccagcaggccagtccacagagaaagacgcattgctgacatttcaacagagatcgggcttggcagcagtaaggcttcaacgcctggatggatcatctgctgcactttcggatcaacgaagctgtaggtgatcacttcctgatagcctttgtcgttgagcagcgttttcacgcgcttgagcgacaggtcagcttcacggtgagtacccataatcaggcttgcctgtaccggctcatccgggatgttgttgtagccgtaaacacgcgcgacttcttcaaccagatcttcttcaatctccatatcgaaacgccagctcggcgcaactgcctgccattcgtctttgccttcggtcacttcgcagccgagacgacgcagaatgtcagttacctgctcatccgcaatatgatggccgatcaggcgatccagtttgctacgacgtagagtgatggttgcacgcttcggcagcgttgcttcgttggtgatatcaattaccgggccagcctcaccaccgcagatgtcgatcagcagacgggtcgcacgttccatcgctttgtgctgcagtgccggatcaacgccacgctcataacggtgagacgcatcggtatgcaggccatgacgacgagcacgaccggtgatagacagcgggctaaagaacgcgcattccagcagcacgttttgtgtttcgtcattcacgccagagtgttcgccaccgaagatgccgcccatcgccagcgccttgttgtggtcggcgatgaccagagtgtcagcattcagcttcgcttcagtaccgtcgagcagcaccagcgtttcgccctctttcgccatccgcaccacaatgccgccttcaatgcgatctttatcgaaagcgtgcatcggctggcccagttcgagcagcacatagttggtgacgtcaacaactgcatcgatagaacggatcccgcaacgacgcagtttttctttcatccacagcggagttggcgctttaacgttaatgccttttaccacacggccaagataacgcgggcaggcttccggcgcttcgactgtaatcggcagcgtgtcgtcgatggtcgcaccaaccggaacgatttccggttgaaccagcggcagctggttcagcacggcaacgtcacgcgcaacaccaatgatgcctaagcagtcggcacggtttggcgtcacgctgatttcgatggtgttgtcatcaagtttcaggtattcacggatatcggtgccaatcggcgcatccgcaggcagttcgataatgccgctgtgatcgtcagaaatgcccagttcagagaaggagcacagcatcccttcagacggttcgccacgcagtttcgccgctttaattttgaaatcacccggcagaacagcaccaatggtcgctaccgctacacgcaggccctgacggcagtttggcgcaccgcagacgatgtccagcaggcgatcgccgccgacattcacttttgtcacacgcagtttgtcagcgttcggatgctgcgcacactcaaccacttcaccaacgaccacgccgtggaagctgccggcaaccggttctacaccgtcaacttccaggcccgccatagtgatttgatttgccagcgcatcgctatcaatcgccgggttcacccattcgcgtaaccacagttcactgaatttcataatctattcctgccttatttaaactgtttgaggaaacgcagatcgttttcgaagaatgaacgcaggtcggtgacgccgtaacgcaacatagtcagacgctccatccccatcccgaaggcgaaaccagagtaaacttccgggtcgatgccaacgttacgcaacacgttcggatgcaccatcccgcagcccagcacttccagccatttaccgtttttacccatgacgtccacttctgcagaaggttcggtaaacgggaagtaggaaggacggaagcgaatctgcaaatcttcctcaaagaagttacgcaggaagtcgtgcagcgtgcctttcaggttggtaaagctgatgttggtatcaacaatcagaccttccatctgatggaacatcggcgtgtgagtctggtcgtagtcgttacgataaacacggccaggcgcgatgatacgaatcggtggctgctgggctttcatggtgcggatctgtacgccagaggtctgggtacgcagcaggcgggtagagtcaaaccagaaagtgtcgtggtcagcgcgcgccgggtggtgaccaggaatgttcagagcatcgaagttatgataatcgtcttcgatttccggcccggttgccacggtaaagccaagctcaccgaagaaactttcgatacggtcgatggtacgggtaaccggatgcagaccgccgttttcaatgcgacgacctggcagagagacatcaatcgtttccgccgccagacgcgcattcagtgcagcgctttccagttccgctttacgcgcattcagcgcctgctgaacctgctctttcgcttcgttgataaccgcaccagctgccggacgctcttctggcggcagctcacgcagggtcgtcatctgaagggttaagtgcccttttttacccaaatattcgacgcgcacattatctaacgcggcaacatctgacgcctggctaatggccgccttcgcactggcaaccagttctgcgagatgtgacatggttttcctcattgtgtcagtggtgacactggttcgttggacttagagcctatcccatcaggctattttacttgccattttggtcccgggctgtgctcgaaattctcacgtacttaaatacgctccggtttctccgcgctggccgtgtccagtctggctgcgacaattacacctgatgagacaggctttttatttttcaaaacgcgcatacaaaaaaagcctccactgggaggctttcaggcgctgttttccgtttctcttctcacgcgctagcctcctggattcaggtgctaaagtaaaaaaagaagcggaaaatagcagcattcattgcttgcgttaccttttggtactcttcaaaagacctttattgaaaaggctacggcgataaaagtcaatgttttgatggcgttgaaacgaaaagagggagactagctccctctttcaactggcttatgccagagctgctttcgctttttcaaccagagcggtgaacgctactttgtcgaatactgcgatatcagccaggatcttacggtcgatttcaacagaggcttttttcaggccattgatgaatttgctgtaagaaataccgttctgacgtgctgctgcgttgatacgcgcaatccacagttgacggaactgacgcttacgttgacgacggtcacggtaagcatactgaccagctttgataacagcctggaaggcaacgcggtatacgcgagaacgcgcaccgtagtagcctttagcttgtttcaaaattttcttgtgacgtgcacgtgcaataacaccacgttttacgcgagccatatgtgctctcctgtatctatattctaattaaaaagttaaaaacgttaacggcttatgcgtacggcaggcacgcgattaccaggcccagatcgcctttggaaaccatggctttcggacgcaggtgacgtttacgtttggtcgcttttttggtcagaatgtgacgcaggttagcgtgcttgtgcttaaaaccacctttaccggtttttttgaagcgcttagcagcaccgcgtacggtcttaatttttggcattttaataacttccacttcgcattgttaataaacgaaacaaaggcgaacaaagcctgtgaagcccgaaggctccacagacagtgctacttgaaggccttactgtttcttcttaggagcgagcaccatgatcatctggcggccttcgatcttcgttgggaaggattcgaccactgccagttcttgcaaatcgtctttcacgcgattaagcacttccataccgatttgctggtgcgccatctcacgaccgcggaaacgcagcgtgattttggctttatcaccctcttcgagaaagcgaatcaggctgcggagttttacctgatagtcgccttcatctgtaccaggacggaatttaatttccttaacctggataactttttgctttttcttctgttccttagaagacttgctcttttcatagaggaatttgccgtaatccattatacgacaaaccggcggctcggcgttagggctgatctcgactaagtctactccggcttcttctgctttctccagagcttctctcagactcacaataccaagctgctcgccttccagacctgttaagcgaacttcctgggcgcgaatttcgccattgatacggttagggcgcgccgtttgaactcgttttccgcctttaataccttattcctccaattgtttaagactgcggctgcgaatctcttgttgcagcttctcgatcacttcatttacgtccatgcttcccaggtctttaccacggcgggtgcgaacggcaactttgcctgattccacctctttatcaccacagaccagcatatatgggacgcgacgcaaagtgtgctcgcggattttaaagccaatcttctcatttctcaagtctgctttaacacgaatgcccgcatttgatagtttttgcgtcaattcgttaacgtattcagactgtgaatcggtaatattcatgataacaacctgaaccggcgcaagccaggtcgggaagaaaccagcgaactcttcggtcaggataccgatgaaacgttccatcgaccccagaattgcgcggtgaatcattaccggtactttacgttcattgtcttcgcctacataagaagcgctcagacgagacggcaaagagaagtccagctgtactgtaccgcactgccatgcacgatcgaggcagtcatacagggtaaattcaattttcggaccgtagaaagcgccttcacccagttgatattcaaacgggatgttgttttcttccagcgcaaccgccaggtccgcctcagcacgatcccacatttcgtcgctgccaatacgtttttcaggacgagtggagagtttgacgacgatcttctcgaagccaaaagtgctgtacatatcatagactaaacggatacatccgttaacttcatcgcgaatttgttcttcagtacagaagatatgcgcgtcatcctgggtaaatccacgcacgcgcatcaggccatgcagcgaacctgacggctcgttacggtggcagctaccaaactcggccatacgcagcggcagatcgcgataagacttcagcccctggttgaaaatttgtacgtgacccgggcagttcatcggcttaatgcagtattcacggttctcagaagatgtggtgaacattgcatctttgtagttgtcccagtgaccggttttttcccacaggacacggtccatcatgaacggacctttaacttcctgatactggtactctttcagtttagaacgaacaaacacttccagttcacggaagatggtccagccgtcgttgtgccagaataccatacccggcgcttcttcctgcatatggtacaggtcgagctgtttaccgattttacggtggtcgcgtttcgcggcttcttccaggcgctgcaggtaagcgttaagtgcttttttgtctgcccacgccgtaccgtaaatacgttgcaacattttgttgttgctgtcgccacgccagtaagcccctgccgttttcattagtttgaaatgatggcagaaacgcatgttcggtacgtgcggaccgcggcacatatcgacatattcttcatggaagtacagacctggcttgtcatcatgggcgatgttttcgtcaagaatggagactttgtagctctccccacggttggcgaaagtttcacgcgcttcgtgccagctgactttcttcttaatgacgtcgtagtttttctcagcaagctcatgcatccgcttctcgagtgcttcgacatcttcctgggttaacgtgcggtcaagatcaacgtcgtaataaaaaccgttgtcaataaccgggccgattgccattttggtatgcggccaaagttgtttaatcgcgtgccctaacaggtgcgcacaggagtgacgaatgatctccagaccttcttcgtctttggcggtaatgatcgacagttgtgcgtcgttttcaatcagatcgcaagcatcaaccagttcgccattaacgcgccctgcgatacaggctttcgccagacctggaccaatgtccagcgcaacatccatggggcttacagcgtgatcgtaatggcgttggctgccatcaggaagagttataacaggcattttatatccttatttgcagtggtgacccacacgaaagatcacatacaaagaaaaatttgtttattaacagttcattgcgaaaccatctagccaacaaatgctaaattggttcgcaatcaggtacacaaatgaaagacattaacctctcaccttccacccggttgagcgatgttaacactaaaaaaagggagattgtacctttccgtttcacattgattcgattcgcaattcgtttgtagtgagtacaccagcaaaacgcttaaagaacaactgataacatcacggtgcgtctgaaaggtttactgcgagcggatttacagcagcataaactgaatccagcaaagttcgttgcgtgatttggcggtagtattttaaacgctcatgagattaatgacgaagtggtcatatcacaatgataaaagtgacacaattcttataacaatttttcgtgcacatttcgttctggcgataataattaatcatcatcctcaaaacctccagatatatataaggcgaacagattatgagtcaaaacgatatcattatcagaactcattataagtctcctcatagattgcacatcgatagcgacataccaacaccttcatcagagcctattaatcaatttgcgcgccagctcatcaccctacttgatacctctgacttaagttcgatgctgtcatactgtgttactcaggaatttaccgcaaactgtcgaaaaatatcacaaaattgttattccactgccctttttaccattaactttgccacttcacccatccatacagaaaatatactcattacattacactataaaaaagaaatcatttccttattactggaaaccacgcctattaaagctaaccatttgcgaagcatactggattatattgaacaggaacagttaactgctgaagatcgtaaccattgtatgaaactgtctaaaaaaatccatagagaaaaaaactatacacccaacagtaaatctcaatggtagtgcatgttttttgcaatctccttctgacgctattttttgtcgccatctgtcattgcaatacgcccttgattcattgagaaatggaaaaggcaaagtcaacctgattaaacattactcctccgttgaatccatacagcagcatgttcccttagtccgggacgcggagttcagagcattacttcgccatcctcctgcagggagtcgcgttatcgcgagtaaggattttggcttcgctttagatattttcttttgtcgaatgatggcaaacaatgtcagtcatatgtccgcgattttatatatagacaatcatactttgtcagtaaggctacgaataaagcagtcagtgtatggacaattaaattatgttgtgtccgtttacgacccgaacgataccaacgttgccgtcagagacacccacaggacagcacggggctttctttcgcttgataagttcatcagttcaggtcccgatgctcagacctgggctgatagatatgttcgcaactgtgcaattgctattctgcccctattacctgtgggagttccaggggctattttcgcgggtattgcatcacgaatgccatttgcccctatacatccatcggcaatgttgttaataatggctacaggccagactcaacagcttattacattattcaaacagttgcccatactccctgaaaaagaaatcattgaaataataactgcgcagaatagcgttggtacacctgctttatttttggctatgatgaacggacatactgacaacgtgaaaatatttatgcaagaaattcagtcactggtagataatcacatcattcatgaagataatctggttaaattactgcaaactaaaagtgctaacgaaacacctggactttatatctccatgttgtatggattcgatgaaataatcgatatctttctgaatgcattaaccactccaatagcacaagagcttttaaacaaaaaactggtgatgagtattttagccatgaaaatacatgatggtgagccaggattatacgccgcaatggaaaataatcaccctttgtgtgtcacacggttcctctctaaaattaatggcatcgcctttaaatacaagttgagcaaagctaacatcatggatttattaaaaggagctacagcacagggaacccctgcattatacatcgccatgagcaagggtaatgaagacgtcgtgttatcttatatatcgacgctgggtgcttttgcaaaaaaacattcttttagtcaacatcagttatttacactattggccgctaaaaatcatgacaacatgtcagctgttcatatagccattcatcataagcattataaaactgtagaaacatattatgctgctattaatgcaatcagccaaagcctgagttttagtgctgatgaaataaagacgtatttataaccagctatttacgatatatatcgatacataattttatttttttcataaaacgcagaaacagtgaccatgtgcacaacgccacccgacggctgtaataacaaaaaatcccttgatgcctgtcccttttgttacactccgttatcacgcacaagagatatgcaggacactggtatgccgactaaacgctttgataaaaaacactggaagatggtggtggtgctactggcaatctgtggcgctatgttgttgctacgttgggcagcaatgatttggggctgagcagtgacaaacgaagacagccagaccgcataacacggtccggcagataattttacatgctgtagcccagcgataaggttgtccgacggtcggtatgttccggtgcagactctggaggttcagagttccatgtgacgttgtaagccaccttcagtccaaaatgttcattaatagcaacatttaatgcgctttcggagttcagcgttgtgtcttccgcgccaaagaccgaaacaccctgcgtaaatttagcgttgtcagtcaactgccatgcataagccccggaggcatagcccagcggctgggtttcactggcattgtcggtatatttgtcgtaacgcacacctggaccgaattcaaagcggaaactgtgtaccgggccattcaaaaactgacgaccataacccgcggtcaacacatcgcgctctcgatagccgttataacggtctgtcagccagcttgcctgaccaaataaatagtcataatcagttaaattaaaacggctacgcccgcccgccgcatatttttctgaagaacgctcatcattagaagaagtattactggcgttcccccacagcgaccaggcagtggtgtgtccataccaggtcatggtggtgtcagccgtaagtgaggagcttttcgtattgcctgattgtgcaagatatcctgcgttcagattaccttcgaaaggttttttagcgctggcaggatcatccatgacagtaaaaacggaatcatcggcagctgcattcagtgacgcaaacatgccccccgccaacataacgatggcaggaactgtcttcaaaagcttcatttatcaagagtccgtacaacaaaaaaagagaccatcgcggtcccggaaactttcttaaggatcaaagattagcgtccctggaaaggtaacgaattataaaaaggcgcgaataacttagcaatgtattcttatttcattttttgaataagcatgtggcgaaaacagatttttatttatatatatttatctgcaaaattttaaataaagctccaataaatcatattgttaatttcttcactttccgctgattcggtgccagactgaaatcagcctataggaggaaatgatggtacgtatctatacgttgacacttgcgccctctctcgatagcgcaacaattaccccgcaaatttatcccgaaggaaaactgcgctgtaccgcaccggtgttcgaacccgggggcggcggcatcaacgtcgcccgcgccattgcccatcttggaggcagtgccacagcgatcttcccggcgggtggcgcgaccggcgaacacctggtttcactgttggcggatgaaaatgtccccgtcgctactgtagaagccaaagactggacccggcagaatttacacgtacatgtggaagcaagcggtgagcagtatcgttttgttatgccaggcgcggcattaaatgaagatgagtttcgccagcttgaagagcaagttctggaaattgaatccggggccatcctggtcataagcggaagcctgccgccaggtgtgaagctggaaaaattaacccaactgatttccgctgcgcaaaaacaagggatccgctgcatcgtcgacagttctggcgaagcgttaagtgcagcactggcaattggtaacatcgagttggttaagcctaaccaaaaagaactcagtgcgctggtgaatcgcgaactcacccagccggacgatgtccgcaaagccgcgcaggaaatcgttaatagcggcaaggccaaacgggttgtcgtttccctgggtccacaaggagcgctgggtgttgatagtgaaaactgtattcaggtggtgccaccaccggtgaaaagccagagtaccgttggcgctggtgacagcatggtcggcgcgatgacactgaaactggcagaaaatgcctctcttgaagagatggttcgttttggcgtagctgcggggagtgcagccacactcaatcagggaacacgtctgtgctcccatgacgatacgcaaaaaatttacgcttacctttcccgctaacaaaaacattcccccagcattgggggaatcatcaccaacctgtcggcaacgcgtttctccgactatgctcaaaagtcatgtgataacaaaggggtgaactatggccagtggcgatcttgtccgttatgtcataaccgtcatgttgcatgaggatacattgactgaaattaacgagttgaataattacctgactcgcgacggttttttgctcactatgacggatgatgagggaaatatccatgagctgggaactaacacttttggacttatcagtacccaaagtgaagaagaaattagagaactggtttcggggcttacccaaagtgcaaccggcaaagatcctgaaatcaccatcacgacctgggaggaatggaatagcaacagaaaataaatggtttttgggcaataatcagtctgtggtgtgcgttagctcgtgtttttacaccgcattcttgcgctaaccttatgatctggcagacaacatgggagagacatcatgtggcaggcaatcagtcgtcttttgagcgagcagttaggtgaaggcgaaatcgaactgcgtaatgaactgcctggcggagaagtccatgccgcatggcatttgcgctatgcaggacatgattttttcgtcaaatgtgatgaaagggaactgcttcccggttttaccgccgaagccgaccaactggagttactgtcgcgtagtaaaaccgtcaccgtgcctaaggtttgggcagttggcgctgaccgtgactacagttttctggtgatggattatctcccacctcgtccgctggatgcgcatagcgcatttattcttggtcagcaaattgcgcgtttacatcaatggagcgaccaaccacaatttggccttgatttcgataacgcgctctccacaactccacagcccaacacctggcaacgtcgctggtcaacgttttttgctgaacaacggattggctggcagttggaactggctgcagaaaaagggatcgctttcggcaatatcgacgccatcgtcgagcatattcagcagcgtctggcctcacatcaaccgcagccttctctgttgcacggcgatttatggtccggcaactgtgcactgggtccggatggcccgtacattttcgacccggcctgctactggggtgaccgagagtgcgacctggcgatgttaccgctgcatactgaacagccgccacaaatctatgacggctatcagtcagtatccccgctacctgccgatttccttgaacgtcaaccggtttaccaactctacacgctgttaaatcgtgcaaggttatttggcggtcagcatttggttattgctcagcagtcattggatagattattagcagcatgatatgggttgaggataatggccgctccgtgcggccttttgattaaataaacccaagcagagaaaagaacacataacctgcagcaatacaaataaccggcaggatatacagtgagaaaaactgcaggaaaatagtatggtgcggaacaacaatacgggactcaatttgttcacgcgttagcccctcttcccctttggctttttccagaatgagttgatcttcaacaccttcccgcaagaagcgcgcctggcgactcatccgggcaccggaatcctgcaacgccagtccgacaaaaatcaggatgaaaatcacccagaacataacgttcacgccaccattaaaattgggcgtcggggagttataccagaataaattcaaaaaaggcgtattcgcctgcatcatatcgatcatgacatgagtaaagtcgagcatgaccgcattaatgccttccttgttttcctgccgggtattcataaatttcagcaaagaaatcaatgtagagatcaatgcaggtataaaaatcacccaacccaaaatccttttcaaaacagcaatgcgtccagcttgttgatacgtcatgagttctccttgattaagacgcgtcgtttcacttagtttacctgtagatatctgttttcgcccattctttaaaggcgatatgataggcgcttaatcataagcacggcttaataccttacacataatgctctaaaggagaggttgtaatgtcaaccccgcgtcagattcttgctgcaatttttgatatggatggattacttatcgactcagaacctttatgggatcgagccgaactggatgtgatggcaagcctgggggtggatatctcccgtcgtaacgagctgccggacaccttaggtttacgcatcgatatggtggtcgatctttggtacgcccggcaaccgtggaatgggccaagccgtcaggaagtagtagaacgggttattgcccgtgccatttcactggttgaagagacacgtccattattaccaggcgtgcgcgaagccgttgcgttatgcaaagaacaaggtttattggtgggactggcctccgcgtcaccactacatatgctggaaaaagtgttgaccatgtttgacttacgcgacagtttcgatgccctcgcctcggccgaaaaactgccttacagcaagccgcatccgcaagtatatctcgactgcgcagcaaaactgggcgttgaccctctgacctgcgtagcgctggaagattcggtaaatggcatgatcgcctctaaagcagcccgcatgcgttccatcgtcgttcctgcgccagaagcgcaaaatgatccacgttttgtattagcagacgtcaaactctcatcgctgacagaactcaccgcaaaagaccttctcggttaatgaccaggggcagtgatctcgctgcccctggttctttatctgaaattgcattcaactgacggattaatcgtcaatttaagagaaagagttacaccgtcaccacttccgtgcactgtataaaaatcctatactgtacgtatcgacagtttagtgagttttatcatgacggcggaaggtcaccttctcttttctattgcttgtgcggtatttgccaaaaatgccgagctgacgcccgtgctggcacagggtgactggtggcatattgtcccttccgcaatcctgacgtgtttgttaccggacatcgatcacccaaagtcgtttcttgggcagcgattaaaatggatatcaaaaccgatcgcccgcgcttttgggcatcgtggttttacccacagtctgctggcggtatttgcgctgctggcaaccttttaccttaaggttccggaaggctggttcattccggctgatgcgctacaaggaatggtgctgggttatttgagccacatacttgccgatatgctgacacccgccggtgttcccctgctctggccatgccgctggcgtttccgcttgcctatcctggttccccaaaagggcaaccaactggaacgttttatctgcatggcattatttgtctggtcggtatggatgccccattcattacccgagaacagcgctgttcgttggtcatcgcaaatgatcaataccttgcagatccagtttcatcggcttattaagcatcaggttgaatactaaaaaggcaaaaatcacctttctggaataagcaattccatttgaatataagagccagctcacagttctgttaatcttgcgccaacactatgactgctacgcagtgatagaaataataagatcaggagaacggggatgaactttccattaattgcgaacatcgtggtgttcgttgtactgctgtttgcgctggctcagacccgccataaacagtggagtctggcgaaaaaagtgctggtgggtctggtgatgggtgtggtttttggccttgccctgcataccatttatggttctgacagccaggtacttaaagattctgtacagtggtttaacatcgttggtaacggctatgttcaactgctgcaaatgatcgttatgccgttagtcttcgcctctattctgagcgcggttgcccgtctgcataacgcatctcagttaggcaaaatcagttttctgaccatcggtacgcttttgtttaccacgctgattgcggcgctggtcggtgtgctggtcaccaacctgtttggtttgacggctgaaggtctggttcagggtggtgcagaaactgcacgtctgaacgccattgaaagtaactatgttggtaaagtctctgatctgagcgttccgcagctggtcttgtcctttatcccgaaaaacccgtttgccgatcttaccggagccaatccgacgtcaattatcagcgtggtaatttttgccgcattcctcggcgtagctgcattgaaactgctgaaggatgatgcgccgaaaggtgaacgcgtcttagccgctatcgataccctacaaagctgggtgatgaaactggttcgcctggtcatgcagttgaccccttacggcgttctggctctaatgaccaaagtggttgcaggttctaacttgcaagacatcatcaaactgggaagtttcgttgtcgcgtcctacctcggtctgctgattatgtttgcagtgcatggcattctgctgggcattaatggcgtgagtccgctgaagtacttccgtaaggtatggcctgtgctgacgtttgcctttaccagccgttccagtgctgcgtctatcccactgaatgtggaagcacaaacgcgtcgtctgggcgttcctgaatccatcgccagtttcgccgcctctttcggtgcaaccattggtcagaacggctgcgccggtttgtatccggcaatgctggcggtgatggttgcgcctacggttggcattaacccgctggacccgatgtggattgcgacgctggtcggtattgttaccgttagttccgcaggcgttgccggtgtcggtggtggtgcaactttcgccgcactgattgtactgcctgcgatgggcctgccagtaaccctggtggcgctgttaatctccgttgaaccgcttatcgacatgggccgtacggcgttaaacgttagtggctcgatgacagctggcacgctgaccagccagtggctgaagcaaaccgataaagccattctggatagcgaagacgacgccgaactggcacaccattaattcttatgctggcaacggtccgttttgtataggggccgttgccttactttttaaatgttccatcgcggcgatgcatactgactcatatttaaacagatcgtcagcgaaaaaaatgtccaacttatcaatacattcctggctcaatgaatgtgcctgtagcgagaagcttaaaacctcatacccgagacgttttctaagtgaactatctggaatactcataatatcttcaagcacaccacttcccattcccggaagatttagtggattaaaaagaagattgatattaagcattgatattatcgaaggaaactttaggagactctcatttttttgaatcgcagcaaaaatgctcccgacaggatgtatataattttgttcatagtatatagtccttaaatagtgaataaccaacctgttttttatactgatcaaattggtcattttttctgggcgaaatacagaagtgacatccattccaataaaatctttatttatacctcttatccgaatttcactaccataaagattattaattattactctatatttaacattgtcctgcagatatgtatcaaaactaagtgctggcgctcctggctttgaggcatcatagttaatgttagacatataggcaatcatataattaaagtttgattctgctatttcatcgcagtcacattgacccgttgatataaagaaagtgagtgctgtcatagtagactgcagcctttctttaaaagagtcgaaagccaggcttttaatatttaaatcaccataattactctgtattaagtttgtagaaaacatctcccgcctcatattgttaacaaaattattatctcatttaaatctaagtcatttacaatataagtttaagagcgacgccacaggatgaactatcaaaaatagctcatcatgattagcaaaacttaaccattttaaaataaataaacaattaaagaaaaaagatcacttatttatagcaatagatcgtcaaaggcagctttttgttacaggtggtttgaatgaatgtagcaacgaaatacagaatttcaggtcatgtaactcccggcaaaaccgggaggtatgtaatccttactcagtcacttccccttcctggcggatctgatttgcccaacgttgggcagattcaggcacagtaaacgccggtgagcgcagaaatgactctcccatcagtacaaacgcaacatatttgccacgcagcatccagacatcacgaaacgaatccatctttatcgcatgttctggcggcgcgggttccgtgcgtgggacatagctaataatctggcggttttgctggcggagcggtttcttcattactggcttcactaaacgcatattaaaaatcagaaaaactgtagtttagccgatttagcccctgtacgtcccgctttgcgtgtatttcataacaccgtttccagaatagtctccgaagcgggatctggctggtggtctatagttagagagttttttgaccaaaacagcggccctttcagtaataaattaaggagacgagttcaatgtcgcaacataacgaaaagaacccacatcagcaccagtcaccactacacgattccagcgaagcgaaaccggggatggactcactggcacctgaggacggctctcatcgtccagcggctgaaccaacaccgccaggtgcacaacctaccgccccagggagcctgaaagcccctgatacgcgtaacgaaaaacttaattctctggaagacgtacgcaaaggcagtgaaaattatgcgctgaccactaatcagggcgtgcgcatcgccgacgatcaaaactcactgcgtgccggtagccgtggtccaacgctgctggaagattttattctgcgcgagaaaatcacccactttgaccatgagcgcattccggaacgtattgttcatgcacgcggatcagccgctcacggttatttccagccatataaaagcttaagcgatattaccaaagcggatttcctctcagatccgaacaaaatcaccccagtatttgtacgtttctctaccgttcagggtggtgctggctctgctgataccgtgcgtgatatccgtggctttgccaccaagttctataccgaagagggtatttttgacctcgttggcaataacacgccaatcttctttatccaggatgcgcataaattccccgattttgttcatgcggtaaaaccagaaccgcactgggcaattccacaagggcaaagtgcccacgatactttctgggattatgtttctctgcaacctgaaactctgcacaacgtgatgtgggcgatgtcggatcgcggcatcccccgcagttaccgcaccatggaaggcttcggtattcacaccttccgcctgattaatgccgaagggaaggcaacgtttgtacgtttccactggaaaccactggcaggtaaagcctcactcgtttgggatgaagcacaaaaactcaccggacgtgacccggacttccaccgccgcgagttgtgggaagccattgaagcaggcgattttccggaatacgaactgggcttccagttgattcctgaagaagatgaattcaagttcgacttcgatcttctcgatccaaccaaacttatcccggaagaactggtgcccgttcagcgtgtcggcaaaatggtgctcaatcgcaacccggataacttctttgctgaaaacgaacaggcggctttccatcctgggcatatcgtgccgggactggacttcaccaacgatccgctgttgcagggacgtttgttctcctataccgatacacaaatcagtcgtcttggtgggccgaatttccatgagattccgattaaccgtccgacctgcccttaccataatttccagcgtgacggcatgcatcgcatggggatcgacactaacccggcgaattacgaaccgaactcgattaacgataactggccgcgcgaaacaccgccggggccgaaacgcggcggttttgaatcataccaggagcgcgtggaaggcaataaagttcgcgagcgcagcccatcgtttggcgaatattattcccatccgcgtctgttctggctaagtcagacgccatttgagcagcgccatattgtcgatggtttcagttttgagttaagcaaagtcgttcgtccgtatattcgtgagcgcgttgttgaccagctggcgcatattgatctcactctggcccaggcggtggcgaaaaatctcggtatcgaactgactgacgaccagctgaatatcaccccacctccggacgtcaacggtctgaaaaaggatccatccttaagtttgtacgccattcctgacggtgatgtgaaaggtcgcgtggtagcgattttacttaatgatgaagtgagatcggcagaccttctggccattctcaaggcgctgaaggccaaaggcgttcatgccaaactgctctactcccgaatgggtgaagtgactgcggatgacggtacggtgttgcctatagccgctacctttgccggtgcaccttcgctgacggtcgatgcggtcattgtcccttgcggcaatatcgcggatatcgctgacaacggcgatgccaactactacctgatggaagcctacaaacaccttaaaccgattgcgctggcgggtgacgcgcgcaagtttaaagcaacaatcaaggtcgctgaccagggtgaagaagggattgtggaagctgacagcgctgacggtagttttatggatgaactgctaacgctgatggcagcacaccgcgtgtggtcacgcattcctaagattgacaaaattcctgcctgatgggaggcggcgcaattgcgccgcctcaaatgatttacatagtgcgctttgtttatgccggatgcggcgtgaacgccttatccggcctacaaaactgtgcaaattcaatatattgcaggaaacacgtaggcctgataagcgaagcgcatcaggcagttttgcgtttgtcagcagtctcaagcggcgcagttacgccgcctttgtaggaattaatcgccggatgcaaggttcacgccgcatctggcaaacatcctcacttacacatcccgataactccccaaccgataaccacgctgagcgatagcacctttcaacgacgctgatgtcaacacatccagctccgttaagcgtgggaaacagtaagcactctgacggatagtattatcgataaacgccggatgacacatcacctccagcgaacgatcaccccgatggcctgcgtcatccagcacttgcaggaacagcgactcactgatctcttcaccgtagaatgcactgctgaatccctgggtagtgcgcaggttgaccggcaaatcaaacgccatctgacgatccgcccgcaacgcaatgccctgctctgccgcaaacctggcaacaatcgggaaaatctgcgggaacatatgcacatgatgatggctatcaagatgcgtaggtttgcgtccaaatagctcaatgaaacgcaaatactgactgacaagctcctgagtaatttcttccagcggtaaagcatcttcttctgccaactgccagatccattttcccagcacaccatcgcgggttaaccccggcatagctgtcagtggcttacccatagtaaggacaaagtgcatccctatggccagactcggttcatcacgactcaactgcaccgcatggtcaatagcctgcccattcaccagcgccgtcgtcgacgtgacaatcccattgcgacaggcctcgataatgccgtagttctgacctttgcttaagccaaaatcatcggcattaacaatcagtaagcgttccataatcagcctcggttaatgtgcttttttaagctctgcgatgcagtcggcaaagtttggcagccatttctcgtgcgccagaatcatctcgcgtgccagcagctcagcatcgcgatcggaatgcaccaacggactaaggtttagcgccagtaacacatcgttaaattctccgctaagtgcggcgttactggcagcaatctcgaagcctttaatggtgtgaatcagccccattactttatcatcgaaatgcgtaatgcgcggatgtggcgtcgcgccatcgcgccccagcttacaggtcatttctactgcccagtctgccggaatattatcaatctgcccatgatgcgggatattaacgtaatgttctgcttgcttgtcgttgtagatagcgttgatcacttcgcatgctgcatcagagtaataagccccaccgcgctgttccagttctttcggcttaactttcagctcaggatttttatacagctcaaaaagttgtttctcgactttctgtactacctgcgctcgtgcgccgcctttgtagtattcgcccatttcaatagccagcatctctttctgcttgaagtaatacagcagataagaacatggcagcagattcaacgaacgaattaagccctcactaaatggcagatcgaaaatattttttacagaggacgcttttaactgccctgacgccacaccatcaagcaattcggcaaagcgcgacttgccatttaccagcacatccttaatgaacaccatatggttgaggccgaacaaatcgatagataaatcatcgctgtctttcagcatcagaacatcgcgaataaacatcttcatgccgatcggaatattacacacgccgataaagcgtttaaatccggtatgacgataaacggcttcagtgaccattcccgccgggttagtgaagttaatcacccatgcattcggacaaagttcttcgacatcttttacgatgtcaaaaatcaccggaatggtacgcagacctttaaacaaaccgcccgcgccgttggtttcctgaccaagataaccatgacttaatggaatacgttcatccagttcacgcgccggtaattggccaacgcgcagttgggtagtaacgaaatcagcatctttcaatgcttcgcggcgatccagcgttttataaagcttcatcgggacgccagcgttatcaatcatccgttggcagagatcgaaaataatatccagtttcgctttaccaccttcgacatccaccagccataattcgctgaccggcaattcgtgataacgcttaataaatccttccagtaactccggggtatagctgctcccgccaccaatagtgacgacttttaatttctggctcataatttctcccttcagtacagaatactgatatctggcatatctgcccccccggacataaataatccagcaacaggacagatatgtgaattgtcaggtataacgacttactgattaaattcagtcaatttcttacgatagctcttaggcgtaaaggacgttaatttcttaaacgttttaataaacaaactcgggctactataaccggcctcaaacgcaatatccgtcactgaatagttggtcatttccagttgttttttggcaaaattaatacggatttcattaataatctgcattggcgttttgccataatatcgttgagtcgctcgcgtcaaatattcctgtgatttggctgacaacgccaccatattctccagcgccgattcactaaactgctctttatcatgcatcttttctaccgtacttttcagccactgcggtacatcatcaatcacctgttcttcgcggtaatgacgtaaacggttaatgacataaaaagtaaccatctcaacaaactcttccagccctgtttcgcggaaattcaatgaagaaatcactgtttccacataggtgagaaaagcgttattggtccggtatacctgcgaagcgacaaagcaataaggcaacaatggcaggtaatgctgctcaaaaaagcgtttactgatcccaacgttcaatatgcgcgtggcaccaaactcataaaaactttgatggtgcgaacctaacggaataaaaacaaaatcgccccgttccagtaacacgcgcttaccgttaatctcctggaaataacgcccggttaataccagagtaaattcataatagtcgtgctgatgcagtccgctgatactctcagttttgttatagataaacacatggaagtttttgccattaaacaactgctgttctcgggcagtggcaatttccggcgcgttaatcactggctgcatcatcgactccttatgccttcagtttttcatgaagctcaattaattcagtaatcagttcacgcgcaagcatggacgtcattaaatgatcctgagcgtggaccagcaccagactcactttcatcttaccttcgcccgcatcgccttcaatcagtttcgtctgtaccagatgcgcttcattcaatgccatccgtgactgatccatcatggcttttgctgcggcaaaatcgccctgcttcgcctgtttcagtgccgcatacgccaggctgcgcgcttgtccggagttgatgatcagccccatcaccacttcttccagctcttcagcttccgtttgcgtatcgggaatgttatcgagatccatcatacatcgttcctctcttttcttaccggcacgattacccgtaccggcatcgattaaaatttcagggcgttagcgatatcttcttcgctctcttctttatcaatcgcattttgtgctttgttagccaccacaacaaagggcagataaattaacgttgcgatgccaaggttgaagagtgcgaccagcaatgcggcgacgctaccgttggtgttaaagaaggctcccagaccggttggcatggtccacggtgcaatattggtcaccggaggaataatgcccatgtagtacgctgcgagggtgattgccgccagaatcggttgtaccagtacaaacgggataaacatcaccgggttcatgataattggcagaccaaacagaatcggttcgttaatctggaagatgccggacggcagcgccagttttgccacctgacgataatcagcacggcgagaggcgataaagatagccaggatcaggcctaaagtcgcaccactgcccccaaggaaaataaaggagtccagcatcggcttggcccagatatggaaggtcttaccggctgccagcgccgcttcgacggaaccatattgctgataggtcgcgatattttccagtgcccacggcgtcataatgccgttgtccagtgcggtcagcgccagcgcgccatgaataccgaagaaccagagcagtggaacaaagatcacataggcccagcccaccacgctacccaacgatgccagtggggttgagatggtatccataatgatctgatggaagttggtgccccaggtattcaacgcccaggcaataatccccatcacggaaagaataataaagccgggaattaatgccgagaaggaacgcgatactgaagcaggtacgctgtcgggcagtttaatgacccaattgcggcggacaataaaggtaaacatttctgccaccaccaggccaataataatcccggagatgatattcgccccacctaaccagtttgcaccaaccgcataggcctcaccgacactatatggggtgacggtcataaatgctgcaacggataacaacccagccgccagcgcatcgactttacgctcttctgccagcgccatgccaataaagaacggtgccattaaagacattattcctaatgttccgttatatacgttgccgccaatacctttcagaccattaagtgtttcaatggttgaggcgtcgaggcgaatacctaaggaataaaaaaacgacccctccccaaagcttagaaaaacgttgttaattaatacaaacatggcccccgcaagggttaacggcattaagcgaataaagccatttttgattgcattaacgtgtggctgctttcctattttaactgcaaaagggaggagtaccttttcaagcgatgcaataacattactcatagaaaaatacccttaaaaaccgcaatttaaatattgcggtattgatttatgaaataactctttgacgggaaaatttaaaataaattaatttgctgcggcttttttaatcgctgcaaccgcagccttaagcacgcctaaaccatcgactttgccataaagcagcgagtcaattacttcaaccggtttgttgggtaacaaacgctggatttcgggcaacatataagcaatctgcggccctaataacacgacatcggcattctgacctttttcaccagccagtgtttccggaaatgcttcaataatgaccggaacttcatatttttctgcctgtgcgcgcatttttgataccagtaaagaggtagacatgcccgcagaacaaaacagataaatgtgtttcttttccataaaactgccctcatcgacgattatctgtcagccagacactccgcaagccttaacctgcttccatgctctgggtaacttgcgaaaccaacatgactttttttgtggctgaaaggagtatacggtatagacctgagcaatagtatttctttgaccttataaattgtttctccttgacctgtggttatgaccctcttcacatttcgggcaaataattcgcgaagataattaagaactcaggccaaaaaaaccggcgcaatggccggtttccgttgttactcaagctttcagacgaattgattacttcgcagcctgtggatcagtgtcgtattcagcacaggtctgataaccggagttgatgacatgtccggtatcatctaacgcgacaaagtaggtttctgctttaccatcacgttgacccaggatgtaggtctggcaagtaccgcgagcatggatcatgctcacttcagacgaaggtttacccgcaatttgtgcaacctgcgcccggctcatgccttttttgacgtctttcaccacaggctgtacaaactggtctttggtacgatcataagccgtacaacccgccagcatggttaataccgccgctgcactcagaattcctgccatattcttgttcatattccgtcctcttgtttatcagcgtgttagataagcctggaatacattgggcgctttttcaagcccgtgaacgaaacggctccgctttcagaggattcctgtatgacgttttaaccaccattcagcccgctgtcgcttgtcgtttcagtagcaacgggttagctttaagcaagttttgtcttttctgtctggaggggttcaatgacattgcaacaacaaataataaaggcgctgggcgcaaaaccgcagattaatgctgaagaggaaattcgtcgtagtgtcgattttctgaaaagctacctgcaaacttatccgttcattaaatcactggtgctcgggatcagcggcggtcaggactccacgcttgccggaaagctgtgccagatggcgattaatgagctgcgcctggaaaccggcaacgaatcactgcaatttattgccgtacgcctgccctatggtgttcaggccgacgaacaagattgccaggatgccattgcctttattcaaccggatcgcgtattaaccgttaatatcaagggcgcggtattggccagcgaacaggcattgcgggaagcaggcattgaactgagcgattttgtccgtggcaatgaaaaagcgcgtgagcggatgaaagcacaatatagcattgcgggtatgaccagcggtgtcgtggtgggcaccgatcatgcagcagaagccattaccggattcttcactaaatatggtgacggcggtacggacattaatccgctgtatcgtctcaacaaacgtcagggtaaacagttactggcggcattagcttgcccggaacacctttataagaaagcgccaacggccgatctggaagatgatcgcccttctctgccagatgaagtggcactcggcgtgacctatgacaatatcgacgactatctggaagggaaaaacgtacctcaacaggtcgccagaacaatagagaactggtatctgaaaaccgaacataaacgccgtccgccaattaccgttttcgatgatttctggaaaaagtaataatttgcacatattggattgtgcgaaaaagagtaatttgttcacgccggatgcggcgtgaacgccttattcgacctataaaactatgcaaattcaatacattgcaggagtcgaataggcctgacaggcgtagcacgtcagacggtgtaacctttgtcatcgacccgcctcttttttaatcgcttcccgcctgttacactggatagataaccagcattcggagtcaacagtggtacggcgtttaacttctccgcggctcgaatttgaagctgcggcaatttatgaatatcccgaacatttacgttcattccttaatgacttacccacccgaccaggggtgtatctgtttcatggtgaaagtgacaccatgccgctctatatcggcaaaagcgttaacatccgcagccgcgtcctttctcatttacgtaccccggatgaagccgccatgctacggcaatcccgacggatcagctggatatgtaccgccggtgaaatcggcgctctgctccttgaagcgcgattaatcaaagaacaacagccgctgtttaataaacggttgcgccgcaatcgccagctctgtgccctgcaattaaatgaaaagcgcgtcgatgtggtgtatgccaaagaggtggatttttcacgagcccccaacctgtttggcctgtttgccaataggcgcgcagctttgcaagcattgcagaccatcgctgatgaacaaaaactttgttatggcctgctgggactggaaccgttaagtcgcggtcgtgcatgttttcgttcagcgctaaaacgttgcgccggagcatgctgcggtaaagagagccatgaggaacatgcgctacgcttgcgccagtctctggagcgtttgcgggtggtgtgttggccttggcaaggggcggtggcgctgaaagaacagcacccggaaatgactcaatatcatattattcaaaactggctgtggctgggggcggttaattcgctggaagaagcgacaacgttaattcggacacccgccgggtttgatcacgacggttataaaattctttgtaagccgctgctttccggtaactatgaaattactgaacttgatccggcgaatgaccagcgagccagttgatttcactgaacaacagtttaccttgcggttgtaaaagccgcagggtgtgcctgccatcgaaccagcacgcgccctggtcggtagtgagcaatttatcgcccagttgccacgccccgttaatcacaaacaccaccccgccgcgtgagccaaaggtagtaaacgtacgttcggcaattctgactttcgccttacagacatccaggcgtgtcatgatgttgaaatccatcgacatctgccctgccgtcagtttcgcttttaccacctggtccgctgcaaaggcaaaaggctggaacggttttaaggtatggttaaagcggtctgcgctttcaaggagcatctcgccgccttccagcaacgtcactatcctttccatgccgggaaacaaagaaaactccccattcgccgcgatggatgcaatgctggcacgccagtaaaaatcacgttttgccggtgggaacgtgcaaatttcgcgcgtttcaccggcagcatttcgccacagattcaccgacattttacgcatatcaaagtattccatactcgctcccggcccgttcttttcattgttatcgttcaggtaaccgtggatggttatcggcaactcgggtgatttacgttagtggtgatcaggctttttttacaactgtttgagaagagaaaagaaaaccgccgatcctgtccaccgcattactgcaaggtagtggacaagaccggcggtcttaagttttttggctgaaagattattcagcagttgcaggcattttaccttttgccgctggacgttctgtcagacgcttctcaaaattagcattaaattgctttttctgttccggcgtcaggatgttgtaaattttgttctgggtttccatgtgcgccagcatgttagctttgcgctgttcttccatttttgcgatctgcgcttcagcttttactttatcgaaggtatcgctggcaatgatgtcatgcattgcgcggcgttcttccagcggcggacgtttcatctggtcacgctggcctttcatgatttcgcggatctgctgtttctgcgcgtcggtcaggttcaggtctttgaacatcatgtcctgatgcggaccgaacttgcctttgtggtgcatcatcggcttcgcgtcagccggtgctgcggtagtggtgtctgcggcatgggccaggttagccgcgccaagagccagggtagaggcaacaaacagtgcagttaatttacgcatattctatatccttcctttcagttatttattacggctttcttaagtagcgtgccgtgttgacgagattaactttactgactttagcgtcaattaatcagagcaacggtaaaacaatgaaagtgtaaaaaacacttttgcgccaattatggagaaaaaaagaaaatttgatggagagtgatgagagaatattacaacacgatgattttgcagagattatgaagaactataccggatgactggtgataaataaagcaaataaccaggattaatctgtattaatttataagaaagcaacttaatacccgcagaatgatttctgcgggtaagtattagcttattttttcgagcattaatcccgcgcgtaatcccaacgctaccaacggattagggaataacacatactctacatcatgggttacggtaaaacgttcctctccgtcctgcgccagcaatgttcctttctcaaacggcataaaattcagcgtgtcacttgccatatgcatttcgaaggacggcgagtggcgagtaatttgcgaaaccacccgataacggagcggcggtgttctcacgataccgacactctcaccagatagcagcgcagcaattgcgctggcagttactgcaaactggcgaagatcgttttgcccaaagggcaacgctttgccaagttccagcgtacaggccagcgcgccaaaatgtctggcgctgaaatgggtaaacgtaccaccaggttcctgatggaacaccagcgcctccagccccgccgcacccagccacgtcagaaatttctcgtcccagggaatgtcgcgttgcggtaatacaccgaactgcggatgcaaggagccacgaattgcggtatgtagatcaaggtgccagcgcacagattctttgccctggtcataaaaatcttccaggcactgttccagttcgcgcgcccgacaggtttctccgctttcagcaaatagctgccaacgaccgccaaacattcgattcatatcgctatggcaataacgtttcccttgcttcagcgcaggaggattcccgaggatcaccagcaaccgccaacgtaacgggatctcgccgtgagatatcgcgccaagcaacgcgtccagcatctccacaggtgccgtctcattaccgtgtatccccgctgaaatcaccagtgcgccttgcggtggcgttaatggcgtcagttccagcacaccatcgcccagccagcgccagcgaacgccgttgatttctcgctcggtgataaccggttttttacccgttaaggtcagagcaagaaaattatccattgccccctccctcgcgctggaacggataaaccgaaccgagattcagtaattggctcaatacatccagtgcttcccgcccttcgcgcagcaattgcgggtcggccagatcggcagcagtaaggcgatcgcggtagtaacgatccacccagtcattgagcgcattaaacagcgtatcgttcatcatcaccgccggattcaccgcccggcgttcttcttctgtcaataccacccgcaaccgcaggcacgccgggccgccgccattcgccatgctttcacgtaaatcaaagacttttagttcgctaatcgggttgtcagcggcaaggagttcattgagataaccccatactccggcgtgttcccgacactcctgaggcagcaccaacatcatggaaccatcatcgcggctcagcagttggctgttaaacagataggtagacaccgtatcagacacggaaacctgagttgccggaacttctatcgccataaaaccattgacccgcgcacgcaggtttgccagtaactgtgactggcgagcgaacgcctgttggtggcaaaacagcacctggcggttactcacggcaatcacgtcattatgaaaaacgccctggtcgataacgtccgggttttgctgggcgaaaatcacctgttggggattcacctgattcagccttgccaccgcctcgctggcttcgcgagtctgtcgcgccggataacgggaaggccgggtatcattgccttcttctcgcccgtagacaaaaagttgcatacccggttcaccgtaatgaccgccgagacgattgtggtttgccgccccctcatcaccgagcaacgctacctgtggcaacgccgaatggacgctaaatttctcttcgtcgttaaaaatcgcttttaacagcgattcagtgacgggcgcttccagcgaacggtgaaatttattgttcaggttggcaacggtgagatgcactttgccatccagcgtatcggcagatggcgcgatcgttgccgcattggctacccacattggcgaagcggaactgacgctggaaagccagtgcggtgcctggcgtgcaactttttccagtacctgctcatcgctaccactgaatcccaactgacgcagcaccggaataaacggacgctcgtgcggcgggatcacggcctgggggaatcccgcatcggcaagggctttcattttcagtaagccctgcttcgccgccagtcgcgggttagacacctgaaaacggtgacgggtagaggcttcattaccaaacgacaggcccgcgtaatgatgcgtcagccctaccagcccgtcgaaattgacttcccaggcgttcatcgcaccacctcatcggaaaaatccagcccggggttaagcgtggcgggcaatgttaacgagtccgactccaggctcgccatcggccatgcgcagtaatctgcggcataccaggcgctggggcgatggttaccggaagcaccaatgccgccgaatggcgcggtactggcagcaccggtaagcggtttgttccagttaacaatccccgcccgcgcctccagcaacagttgatcgaacttttcccgctcgggggaaaccagaccgcaagagagtccgaagcgagtgttattcgccattcgaatcgcttcatcgaaagtatcataacgccagacgcgcaataacggtccgaacacctcttcatctggtacgccagcaacgcctgtcatttcaatgatccccggcgtcagcaacgatgtccctgcttgtaataagcgcggcgcaagcaggggtcgtccgcccatcgcttccagttgctgccatgcagtaaccacctgctgtgcggcctgttcagaaatcagcccgccaataaacggctgcggttcgtcatcccagttgcccggcgttaatcgctggctgacggcaaccagacgagcaagaaacgcatcgccctgcgccccgcttttcagcaataaacggcgggcgcaggtgcagcgttgaccggctgtgacaaacgccgactgaatggtcagatggacagccgcgtcgatatccgccacctcatcgataattagcggattattaccgcccatctcaagggcgagaattttctccggctgaccggagagctggcgatgcaactggtagcctgtattggcgctaccggtaaacagcaaaccgtcgagatcctccagcgcactcagcgcctgacccgtttcacgcccgccctgcaccaggttcagcacgcctggcggcaagccagcctgctgccataaacgcattaccgcttcgccactccacggtgtcagttcgctgggtttaaagataatggtgttacctgccagcaatgccggaacgatatgtccgttcggcaaatgaccagggaaattatacggcccaaacaccgccagcacgccgtgcgggcgatgtcgcaggctcgccgcgccgtccggcatttcactacgctgctcgccggtacgaacgtgatacgccttaattgatatcgcgattttattgatcatcgccgtcacttcggttgccgcttcccagcgcggcttacccgtttctctggcaataatcgcggttaattcggctttattgctttccagcagtgcggcaaagcgttcgacaacggcatgacgttcagcaaatgaaagccgcgcccagcgcggaaacgccgcacgggctgcccgacaagcctgctcgacctgagcggcatcggcatcattgccttgccataacacctcgcccgataccggattacgcttcacacgcgatgcgccctggcccgttatccagtcaccgttaatccataaagtcatgctgttttctcctctgcgcacaggcgcaccagacgaacgcgatccccggcgtggcatttgagggcatccagttgtgcggcggttaaaatcaaacgctcggttgccggatcggtacgcaccagcaccacgcggaaatggtgataattttcattggcgaccaggcaggctgggaaatcgccctgcgcaggctgcccttctgccacttccaccagccgacttttacggatggcgcgcacgcggtcgatgtcacactcaagcgtcggcccaccgtcaaagatgtcgatatagttacggtagcgaaaaccttctttctccagcaccgcgcgggcaggcgcggtttgcggatgtacctgaccgatgacgtcctgggcttcctgggataaaaagtgggtatagatcggatgtttcggcatcagttctgcaataaatgccttttgcccggtgccgcagagaaaatcggcgcggctaaaatccatcgaaaagaagcgtttaccgaggctttgccagaacggtgaatagccgtgttcgtcaatcaccccgcgcatttcagcaaccactttgtcattaaacttgtcgcgaaaagccgccataaacataaagcgcgatttcgacagcaaatagccgttgccctctttgcgccagtccgggtcgagaaacagcgtgcacagctcgctgctgccggtgtgatcgttactgagaaacagcgtcggcaatgcgttatagacattcagctcttttgaggcgtgaaccaacgtgccgacgcgatagttgtaccagggatcgttcagcccaaccgccacctcaatggcacaaatccccgccacggtgcctgtctcgctatcttccagcacgaacacatagccctgctcacttttgggcagttcgccttgccaggttttgattgccctttcgatacgcgccgaaagcgtggcttcattggcgggaagcgacgtcaggccgccgcccgttttgctggcaagctgcatcagcgccgagacatctgatcgctcaacgggacggatgaccatcatgatgaacctcggctaacaaagtgttcgcaagcagctgcaaagcgatccagtccggtcgtcacctcttcttcgctgacattgagcgcaggcgcaaaacgcaccacgttgccacccgcaatcagtaccatcacgcctgctttcgccgcttcctgagagatctgtttcgcttgcccggcgtaatcggcattcagtacacagccaatcagcaaacctaagccgcgaacttcactgaacaaaccatagcggtgattaatagtattaagacgctcaacaaaccagtcgtgacgctgtttaacgccattaagcatctctggtgtgttgatgagctccagcactttgcctgccaccgccgaggccagcggattaccgccataggtggtgccatgagtgccaacggtcatcacgcgggcgcactcttcggttgccaacaacgcaccgaccgggaaaccgccgcccagcgctttggcggtagttaacagatcaggcgtcacgccgtagtgcatataggcatacagttccccggtgcgcccgacgccggtttgtacttcatcaaaaatcaacagcgcattgtggcggttacacaattcacgcagaccttgtaaaaacgcgttgctggctggcaccacaccgccttccccctggatgggttcgacaatcaccgcacaggtagagtcgtcaatcagcgcgctggcagagttaatatcgttatatgcagcatgacgaatatccgccggcagtggcgcaaaatcctgtgaataggctggctgcccacccgcactgacagtaaacagcgtgcgaccatgaaacgcatttttgaacgccacgatgccgctcttatggctgccgtagcggtcgtgagcgaatttacgcgccagttttagcgccgcttcgttggcttccgcaccggagttacaaaagaagacgcgatcggcaaacgtggcgtcgatcaattttttcgccagtcgcagtaccggctcgttggtgtaaccgttgccggtatgccagaacttactcgcctgttcgttcagcgcttcacgcagttccggatgcgcatggcccagcgcgttcaccgcaatgccacccgcgaagtcgatatactctttcccctgctgatcccacaagcgcgaaccttcgccacgtaccggtataaagggtgccggagcgtaaacaggtatcatccattcatcaaagttttcacgcgtaattggctgagacatagcgacctctacagtaaataattcgttatttatatgttaataataagtaatgtttgcgctgtaaatgtagattgcagggttcgtgccagccagtgataaaagtgcataaacggcggaggctaactggaaatcaaggagttataaccaaaccatatgcatttaaagtgcatataaagtgaatacgtttgcgatgtgggtgaataaaaagaataaaaaacgcaatgttatgcagaagtaaaatataattctggaattgtgatcattgacgaaatttactggaaattactgcgccattctgacgcagcgcgcactaaaagcgggcattttttgcgccatcgttgacatcattaacaaccatcgatcaaatcacttaacaacaggcggtaagcaacgcgaaattctgctaccatccacgcactctttatctgaataaatggcagcgactatgaaatttgtctcttttaatatcaacggcctgcgcgccagacctcaccagcttgaagccatcgtcgaaaagcaccaaccggatgtgattggcctgcaggagacaaaagttcatgacgatatgtttccgctcgaagaggtggcgaagctcggctacaacgtgttttatcacgggcagaaaggccattatggcgtggcgctgctgaccaaagagacgccgattgccgtgcgtcgcggctttcccggtgacgacgaagaggcgcagcggcggattattatggcggaaatcccctcactgctgggtaatgtcaccgtgatcaacggttacttcccgcagggtgaaagccgcgaccatccgataaaattcccggcaaaagcgcagttttatcagaatctgcaaaactacctggaaaccgaactcaaacgtgataatccggtactgattatgggcgatatgaatatcagccctacagatctggatatcggcattggcgaagaaaaccgtaagcgctggctgcgtaccggtaaatgctctttcctgccggaagagcgcgaatggatggacaggctgatgagctgggggttggtcgataccttccgccatgcgaatccgcaaacagcagatcgtttctcatggtttgattaccgctcaaaaggttttgacgataaccgtggtctgcgcatcgacctgctgctcgccagccaaccgctggcagaatgttgcgtagaaaccggcatcgactatgaaatccgcagcatggaaaaaccgtccgatcacgcccccgtctgggcgaccttccgccgctaatttagcagctctcctggctcaaactgggtcaggagaattaaccttgagaaaaatcaacaaactgtcagtaatgatttgttgcctgccgtccgttgttataccgtctctgcgtttttagttgtctgaccacttctctattatcaagtttgatataggaaactccacgatgaacgctgagcgtaaatttctttttgcctgtcttatttttgcgctggtcatttacgctatccacgctttcggtttattcgatctgctcaccgatttaccccacttacagacactcatccgccagagcggatttttcggctatagcctctatattctgttattcatcattgccaccctcttgctgttaccaggaagcatactggtgatcgcgggaggaatagtttttggcccgctcttagggacactactctcattaattgccgccacgctggcctcctcgtgctcattcctgctggcgcgctggctgggacgtgatttactgctgaaatacgttggccatagcaataccttccaggccattgaaaaaggcattgcgcgtaacggtattgattttcttattctgacccgcttaatcccgttgtttccttacaatattcaaaattacgcttacggattaaccacaatcgccttctggccttatacccttatttcggcactcacgaccctacccggtattgttatttataccgtgatggcaagcgatctcgccaatgaaggcattacgctgcgctttattttacaactctgtctggcgggcctggcgctgtttattctcgtccagctcgcaaaactctacgcccgacacaaacatgtggatctgtctgcttcgcgccgcagcccacttactcacccaaaaaatgaaggatagaacgatgttgcaacattattcagtgtcatggaaaaaaggactggctgcactctgtttactggctgttgctgggcttagcggctgcgatcaacaagagaatgcggcggcaaaagtggaatacgacggactttcgaacagccaaccgctgcgtgtcgatgccaataaccatacggtaaccatgctggtgcaaattaatggtcgtttcctcaccgacgacactcgtcacggtattgtgtttaaagatggctccaacggacataaatcgctgtttatgggttatgcgaccccgaaagcattttatgaagccctgaaagaggcaggtggtacgccgggcgaaaacatgacgatggataataaagaaacgactcatgtcacaggcagcaaactggatatttcggtcaactggcaaggggcggcaaaagcgtattccttcgatgaagtgattgttgacagtaatggcaagaaactggacatgcgctttggcggtaatttaacggcagcagaagagaagaaaacgggttgcctggtgtgtctggatagctgcccggtcggcatcgtcagcaatgcaacatacacttatggtgcggttgaaaaacgtggtgaagttaaattcaaaggcaatgcctcagttctcccggcggataacacgctggcaacggttacctttaaaatcgccgaataaagccaggataaaggatgatgatgatgcaatcgcgaaaaatctggtactaccgtataaccctcatcatcctgttgttcgctatgctgctggcatgggcgctgcttcccggcgtccatgagtttatcaatcgcagcgttgcggcgtttgccgccgtggaccaacagggtatagaacgctttattcagtcttacggcgcactggcggcagttgtctcgttcttgttgatgattttgcaggccattgctgcaccgctacctgcgtttttgatcacctttgccaatgcgtcgctgtttggcgcgttctggggcggcttgctgtcgtggaccagttcgatggccggcgcggcgctgtgcttttttatcgccagagagatgggccgcgaagtggtggaaaaattaaccggcaaaaccgtgcttgacagtatggacggctttttcactcgctacggcaaacacaccattctggtctgtcggttattgccttttgtccctttcgatccaatcagctatgctgccggtttgacttcaatacgttttcgctcgttttttatcgccaccgggcttggtcagttaccggcaactattgtttattcctgggcgggcagcatgttaacaggcggtactttctggtttgtcaccggactgtttattctgtttgccctgaccgtggtgatttttatggcgaagaaaatatggcttgaacgccagaagaggaatgcctgatgggtttaccgccgcttagcaaaattcctttaattttacgtccacaggcgtggctgcatcgtcgccattacggcgaggtgctaagccccattcgctggtgggggcggatcccgtttatcttttatctggtgtcgatgtttgttggctggctggagcgcaaacgctcaccgctcgatccggtagtacgatcgcttgtcagcgcgcgcattgcgcaaatgtgcctgtgtgagttttgtgtggatatcaccagtatgaaagtcgccgagcgcaccggcagcagcgataaactgctggcagtggctgactggcggcaaagcccgctctttagcgatgaagaacggctggcgctggagtacgccgaagccgcaagcgtaacgccgccaacggtcgatgatgccctgcgtacccgactggctgcgcattttgacgctcaggcgctcaccgaactgacggcattgatcggcctgcaaaatctgtcagcccgttttaattctgccatggacattcccgctcaggggctgtgccgtattcctgaaaaacgttcttaaggagagatgatgcgccattgtgggtggttgctgggattgttatcgctgttttctctggcaacacatgccagtgactggcaagaaattaaaaatgaggccaaagggcaaaccgtctggtttaacgcctggggcggcgataccgcaattaaccgctatctcgactgggtgagcggcgagatgaaaacccattacgctataaacctgaagattgtccgtctggcggatgccgcagacgcggtgaagcgcattcagaccgaagccgcagccggacgtaaaacgggcggctcggtggatctgctctgggtgaacggcgaaaacttccgcaccttaaaagaggccaatttattacaaacgggctgggcggagactctgcccaactggcgctatgtcgacacacagctgccggtgcgggaagatttttctgtgccgacacaaggtgcggaatcgccctggggcggcgcacaactgacgtttatcgcccgccgcgatgttacgccacagccaccacaaacgccgcaagccttactggagtttgctaaagccaatcccggcacggttacctatccgcgcccaccggactttaccggcacggcgtttcttgaacagttgctgattatgctgacgcccgatcccgccgcattaaaagaagcgccggacgatgcgactttcgcccgtgtcactgctcccttgtggcaatatcttgatgtgctgcatccgtatttgtggcgcgaaggaaaggatttcccgccttcacccgcgcggatggatgctctgctgaaagccggcacattgcgcctgtcgctgacctttaaccccgcgcatgcgcagcaaaaaatcgccagcggcgatttgcctgcaagcagttacagttttggctttcgcgaggggatgattggcaacgtgcatttcgtcaccattcctgccaacgcgaatgccagtgctgcggcgaaggtagttgccaatttcctgctctcacccgatgcgcaactgcgtaaagcagatcccgctgtctggggcgatccttctgttctcgatccgcaaaaactgcctgacgggcagcgcgaatcattgcaatcaagaatgccgcaggatctgccgccggtactggctgaaccgcacgcaggttgggtaaatgcgctggaacaagaatggctacaccgttacggtacgcattaatctttttgctgtgggcgatggtggcggtgatttatgcaccgctgatcccggcagctctcacgctgatatcgcctgctttgtcgttgacacactggcaggcgttatttgccgatccacagttaccgcaggcattactggcaacactggtgtcgacaaccatcgcggcggtcggggcattgttgattgccctgctggtgattgtggcgctgtggcctgggccgaaatggcagcgtatgtgcgcccgtctgccgtggctgctcgccattccccatgtggcttttgccaccagcgcccttctgctctttgctgacggagggctgctttatgactatttcccgtatttcactccgccaatggaccgatttggcatcggtctgggcctcacccttgcagtgaaagaaagcgcatttctgctgtggatcttagcagcagtattgagcgaaaaatggctgttgcagcaggtcattgtgctggattcgctgggctacagccgctggcaatgcctgaactggctgctgttgccctccgtcgcgcctgcgctggcaatggcgatgctggcgattgttgcctggtcgctgtcggtcgtggatgtggcaattattctcgggccaggtaatcccccgacgctggcggtaattagctggcagtggttaacccagggcgacattgaccaacaaacaaaaggcgcgcttgccagcctgctgttgatgctgttactcgccgcctacgttttgctgagctatctgctatggcgcagctggcggcgcactattccccgcgtagatggcgttcgcaagcctgccacgcctttattgccgggcaatacgctggcgatttttttacccttaaccggtgtgctgtgtgtggttctgctggcgatcctcgcggatcagtcgacgatcaatagtgaagcgctcatcaacagcctgacaatggggctggtggcgacattcatcgctttgctcctgttactgctgtggctggaatgggggccacagcgtcgccagttgtggctatggttgcccattttattacctgctctgccactggtggcgggccagtacacgctggcgctatggctgaaactggatggaagctggacggcggtggtctgggggcatctgctgtgggtgatgccgtggatgctgtttatcctgcaacccgcctggcagcgcattgattcacggttaattttgattgcgcaaacactgggctggtcgcgggccaaaatcttcttttacgtgaaatgcccactcatgttgcgccctgtgctgattgccttcgcggtgggatttgcagtcggtattgcgcagtatatgccaacgctgtggctgggcgcggggcgttttccgacgctcaccactgaggcggtggcattaagcagcggcggcagcaacggtattctcgccgcccaggctttatggcaactgctattaccgcttattatttttgccctgaccgcgttagtcgcaaaatgggtaggttatgtcagacaaggactccgctaatgctctgcgtgaaaaatgtttcgctacgtttaccagaaagccgcttgctgacaaacgttaactttacggtggataaaggtgacattgtcacgttaatggggccgtctggctgtggaaaatccactctgttttcatggatgattggtgcactggccgaacagttttcttgtacaggtgagctatggctcaatgagcaacggattgacatcctacccaccgcacagcgtcagattggcattctttttcaggatgcactgttatttgaccagttcagtgtcgggcaaaatttactgctggcgctaccggcgacacttaaagggaatgcccgacgtaatgccgtgaatgatgcacttgagcgttcaggccttgagggagctttccatcaggatcctgccactttgtctggcggtcagcgagcgcgcgttgctctactacgcgcccttctcgcccaaccaaaagcgttactcctggatgagccattcagccgtcttgatgtggctctgcgcgataattttcgccagtgggtgttcagcgaagttcgcgccctggcgatccccgtcgttcaggtaacgcacgatctccaggatgttcctgctgatagttctgttctggatatggcgcagtggtcagaaaattacaacaaactgcgataacgcaaagtttttctcaatgcgtcagttcagaatggcgcactcaaaactacaatgtcgggattttcgatgaaacgtgtttctcaaatgaccgcgctggcaatggctttagggctggcttgcgcttcttcgtgggccgctgaactggcgaagcctcttacacttgaccagcttcaacaacaaaatggcaaagcgatagatactcgccccagcgcgttttataacggctggccacaaaccttaaatggcccttctggtcatgaacctgccgccttaaacctctctgccagctggcttgacaaaatgagcaccgaacagctcaacgcgtggatcaagcaacataacctgaaaaccgatgctccggtggcgctgtacggtaatgacaaagatgtcgacgccgtcaaaacgcgactgcaaaaagcaggtttaacgcatatctccatcctgagtgacgcgctaagcgaaccttcccgtctgcaaaaactgccgcattttgagcagctggtttatccgcaatggctgcacgacctgcaacaaggtaaagaggttacggcgaaacctgccggtgactggaaagtcattgaagcggcctggggcgctcctaagctttaccttatcagccatattcccggcgctgactacatcgataccaacgaagtggaaagtgaaccgctgtggaacaaagtttctgatgaacaactaaaagcgatgctggcaaaacacggcattcgccatgacaccacggtcattctgtatgggcgtgacgtatacgctgcagcgcgtgtggcgcagattatgctttatgctggcgtgaaagatgtgcgcctgctggatggcggctggcaaacctggtccgacgcgggactgcctgttgagcgcggaacgccaccgaaagtgaaagcggaaccggatttcggcgtgaagatcccggcacaaccgcagttgatgctcgatatggaacaggcccgtggactgctgcatcgccaggatgcatcgctggtgagcattcgttcgtggccagaatttatcggtacgaccagcggttacagctatattaaaccaaaaggtgaaatagccggcgcacgttggggacacgctggtagcgactcgacgcatatggaagattttcataacccggatggcaccatgcgcagcgccgatgatattaccgctatgtggaaagcgtggaatatcaaaccagagcagcaagtttcattctactgcggcaccggctggcgcgcgtccgaaacctttatgtacgcacgcgccatgggttggaagaatgtttccgtgtatgacggcggctggtacgaatggagcagcgatccaaaaaatccggtagcaaccggtgaacgcggcccggacagtagcaaataacattgcaattactgacgctggagcgacttcagcgtcagatacccactccacacccgcgtaaaggtcgtcatccagcacaacgcaccgaagatccacgcaaaccacgcaaaccatgcagggaataaacatcccagcacaaacagtaagatcgtttctgtgccttcggttaatccccccagatagtaaaacgacttatgtgcataaccggggttatcaatctgatgttttgctgccagtgcagcaaaggcgagaaaactgctgcccgtgccgataaacgcaaacaacaaccagccgcctgccagcgcattttgctccggtgcagcaagaataaagccaaacggcaccagcgcgtaaaagagaaaatcgagagaaatatcaagaaagccgcccgcgtcggtaagctctctgcgccgcgccagcgcaccgtccagaccatcaagcagcctgttcaacaaaatgacgactagcgccgccagataccagcccagcgccagaaacggcagagccagcacgccgatggcaaatcccactaatgttaaaccatctggcgtaatgcccggtttatcaagaacccgcacgcactgatgcaacaacggtttaatccggggatgaagatggcggtctagcacaggcactccttaaatataaagcctttctgattgagcaacagtgcggatattatggcatttttcgcttatctgcccgtgtgtaatttatgaaaatgattgaagttgttgccgccatcattgaacgtgatggcaaaattttactcgcgcaacgccccgcccagagcgatcaggcgggattatgggagtttgccggtggtaaagtcgagccggatgaaagtcagcggcaggcgctggtgcgtgagttacgcgaagaactgggcatcgaagcaactgtgggtgaatatgttgccagccatcagcgagaagtttcggggcggattatccatcttcatgcctggcacgtacccgacttccacgggacgttacaggcacatgaacatcaggcgctggtctggtgctcacctgaagaggcgctgcaatatccgctggcccctgctgacattccattattagaggcgtttatggctttacgcgccgccagaccagcggattagtgctaagggttttgtcatcacgctggcattgcagcagtattccttcggctttaattaccgccccttcagaataattttgatcctgataaacgcagcactgagtacagggctgcgctgactgcccgcctgaactgaacacttctggcggtacgtttacctccacgtccggacgataatgcgggttagccagtgcaattaatggaaatgctaatactacggcgaacaatgctcgactcacagggaactccttaacgttattgtctctgctactgataacggtagccgggtggcaaaactttagcgtctgagttatcgcatttggttatgagattactctcgttattaatttgctttcctgggtcatttttttcttgcttaccgtcacattcttgatggtatagtcgaaaactgcaaaagcacatgacataaacaacataagcacaatcgtattaatatataagggttttatatctatggatcagacatattctctggagtcattcctcaaccatgtccaaaagcgcgacccgaatcaaaccgagttcgcgcaagccgttcgtgaagtaatgaccacactctggccttttcttgaacaaaatccaaaatatcgccagatgtcattactggagcgtctggttgaaccggagcgcgtgatccagtttcgcgtggtatgggttgatgatcgcaaccagatacaggtcaaccgtgcatggcgtgtgcagttcagctctgccatcggcccgtacaaaggcggtatgcgcttccatccgtcagttaacctttccattctcaaattcctcggctttgaacaaaccttcaaaaatgccctgactactctgccgatgggcggtggtaaaggcggcagcgatttcgatccgaaaggaaaaagcgaaggtgaagtgatgcgtttttgccaggcgctgatgactgaactgtatcgccacctgggcgcggataccgacgttccggcaggtgatatcggggttggtggtcgtgaagtcggctttatggcggggatgatgaaaaagctctccaacaataccgcctgcgtcttcaccggtaagggcctttcatttggcggcagtcttattcgcccggaagctaccggctacggtctggtttatttcacagaagcaatgctaaaacgccacggtatgggttttgaagggatgcgcgtttccgtttctggctccggcaacgtcgcccagtacgctatcgaaaaagcgatggaatttggtgctcgtgtgatcactgcgtcagactccagcggcactgtagttgatgaaagcggattcacgaaagagaaactggcacgtcttatcgaaatcaaagccagccgcgatggtcgagtggcagattacgccaaagaatttggtctggtctatctcgaaggccaacagccgtggtctctaccggttgatatcgccctgccttgcgccacccagaatgaactggatgttgacgccgcgcatcagcttatcgctaatggcgttaaagccgtcgccgaaggggcaaatatgccgaccaccatcgaagcgactgaactgttccagcaggcaggcgtactatttgcaccgggtaaagcggctaatgctggtggcgtcgctacatcgggcctggaaatgggcacaattcattgcagttacgctctaatgtaggccgggcaagcgcagcgcccccggcaaaatttcaggcgtttatgagtatttaacggatgatgctccccacggaacatttcttatgggccaacggcatttcttactgtagtgctcccaaaactgcttgtcgtaacgataacacgcttcaagttcagcatccgttaactttctgcgatagcagcagatatgccagtaaagaaatcccatttgactatttttttgataatcttcttcgctttcgaacaactcgtgcgcctttcgagaagcaagcattatataatgccaggccagttcttcttcaattgtcccgttttgaaaagctgtgcttgatatcgagatcatccatgataattccgccgcccatattagcttcgccgaggatttaccggagctatgattagcgcaatcagagatatagtctgagggaaaaacagcaaatttattcaacaaggcgataacctgctctggggcttcctccatgtttgctttaaaggtattggctccatggtcgccagaaagaaaatgctccattaaggcacaataactttcgctatcttcgataccccattgatcctctaaagactcgcgtcttttacttatgatatcgatcgagtcaaaaggaagcacatgatattggaaggtatctttgccaggttcaggctttcgcggccagaactccagcgtttcagaccattgcttatgatagaatcgataaggtgcgatcaattgtagcgcctgtaacttctcgatactgagcggctcaatacctttagcctgataataatgcagttgttctttttttgctttaaaaccggcccgaacaataagccccatcataattaatagataaagaaaagagcatcccgcggtaatcaggcctctttcattcaaaccgttggatgttatcgctgcgaacacaaacattacagcgacaacacatgttaaataaaacccccacttacaaagcagcatggccttattttctttaatcatccgttcaaaattactattaaatatttcccagccattaaaagaatacttctcgctcccaggatggttttgtaataaaacttttttcatcacattccctgttattacatactttagaggcgataattttatccatgcaaaaaaaatatccaacgaattttcttgatccgctggatatttcagaatatgactcgaatagcacgaaagattcactcgcttacgctatcgccccgcttccgacttcatctgctggcggactttttttcgcactacgtttacgcggtgcagcctttttcttatcagcactgccaccactgcccggagccacaatgccgcgaaactgccgcaccggcgtacgtttggcttgatcaataagctgatatagcgtccccaccagcggctgcataaagtcctgatagcgacactgcttttcgctgatttgcgtcagcaccgattcccagtgcgcggtcatgtccggtcgcgtcgccatctccggcagcgaatggaatagcgcttttccggcgtcggtggagtggatatagcgcccttttttggtcaggaaaccacgcttgaacaacagttcaataatcccggcacgcgttgcctctgtccccagaccatcggtcgcacggaggatctttttcagatctttatcctgcacaaagcgcgcgatcccggtcatcgccgaaagcagtgttgcatcggtaaaatggcgcggcggctgggtttgccgctctaccacttcacctttttcacacagcaactcatcgcctttcgccaccacaggcagtggcgtgccgtcgttttcttcatcgcgctctttgctgcctaacagcgtgcgccagcctgcttcagcaagaaaacgcgctttagcgacaaatttgcctttggcaatgtccagttcgataacacacttgcggaacaccgcatccgggcagaattgcatcagatactgacgggcaatcaggttatagaccttcgcttcgttctccgtcaggttgatcgcagaactccgtgcggtcggaatgatggcgtggtgcgcatcgacctttttgtcatcccaacagcggttgcgtatatctggatctaccactggctgcggcaacagatccggtgcatgaacactgatggcattcatcaccgcgtggcgtccggcaaaatgttcttctggcaaatagcgacaatcagaacgcggataagtgattagcttgtgcgtttcgtacagtttctggcagatatcaagcacgttctgcgcactcagaccaaaacgttttgccgcttcaatctgcaacgctgaaagcgaaaaaggcagcggcgcggattctgattcccgtttatcgttatagctggtgacaatagccggttgaccactaatgcggttaaccacatgctccgccagtggacgatgtaacaagcgcccttcttcatcctggtacggttcacacgcttcgctcggttgccagatagcggtaaaccgctcatcggcaggtgtcacgatatgtgctttgacttcaaagaagtctttcgccacgaagttttcaatctcttcatcgcggcgcaccaccagcccaagcacgggcgtctgcacgcgtcccacggaaagtacgccctgataaccggcattgcgaccgagaatggtatacgcacgggtcatattgatgccgtacagccagtcggcacgcgctcgcgccagcgcagaaacgcacagcggtacaaactcactgttggaacgaagacggtcgatcgcccgctcaaccgcctgcgggttcaggtcgtttatcaagcaacgctgtacctgctggcgcttttccggtgccagttgcagatagtccagcacttcatccaccagcaattgcccttcacgatccgggtccccggcgtgaacgatttcgctggcttcatgcaggaaccgtttgatgacgttaagttgtttggtcacggagggtcggggctgtaattgccacttttccgggacaatcggcaaatccgcaagattccagcgcgcatagcggctgtcgtaggcgtctggctgcgcctgctcaagcaggtgaccgatacaccaggtcaccacctgaccattaccgcactcgataaagccatcgcctttccggtgcggtttgggcaggacatcagcaatggcgcgcgccagactcggtttttcggcaataaacaaccgcattgaattaacgaatctcaaccatggcacgaccgccgcgcgctggcaccagttcgccaattgccgtcagttcaatgccaaactcggcggctgtagctttgacctcattttctgcttccggcatgaccgccagcagcaaaccgccagaagtttgcggatcacacagcagatcgcgcacttcacgcggcatttcacccatcagatgaccgtagctggcaaagttacgttcagtgccgccaggtactgcgcccaacttaatgtactcttcaacaccggggagtttcgggatcgcttcatagtcgacgcgtgcctgcacaccagccccctgacacatttcgctcaagtggcccagcagaccaaagcccgtaacgtcggtcatcgcttttacgccttcgatgttggcaaaggacgcgcctgcgatgttcatccggcacatcacttccgtcgccagtccctgatgttctggtttcaacagtgattttttctcagccgtggtaagaacgccgatccccagcggtttcgtcaggaacagtttgcatccggcttgtgcggtactgtttttcttcacccgctcggtcggtacgatccccgttaccgccagaccaaaaatcggctccggcgcatcgatggagtgaccgccagccagcgcaatacccgcctgacgacatgcatagcgtccaccttcggtcacttcgcgggcaatttctggggaaagtttgttaatcggccagccgaggatcgcaatcgccataatcggtttgccccccatcgcgaagatatcgctgatggcgttagtcgccgcaatgcggccaaaatcgaaaggattatcaacgatcggcataaagaagtcggtggtactgataacgctggtgccattgcccagatcgtacaccgccgcatcgtcgcgggtttcattacccacaagcaaattcggatcaacaaacttcgcctgctcactatgcaggatggtttccaacacttttggggaaattttacagccgcaaccagctccgtggctgtattgggtcaaacgaatcgagttctcgctcatggacatctcctgtcaatgcaatccgggtatggtaaccctcattccgtgaagtgataagtgagagtgtctgaattcctgcgcctttgctcacaatccagacagtttcgcgacaattatcagaaataagttacaaacggcgtcgggtccgggacgttaatcgacgtagatgctttcagctgcggcgtaccgaggtagagaaaaccgacaattttatcctgctcacggcaaccgaatgcttcacgcactaccggactttcagttaatgcgccactgcgccagatgccgccaaacccctgggcaactgctgccatttgcatcgccatgaccgcgcatccggcagacatttcctgttcccagcgcgggactttatgattctcttcgcatttcgccaccaccgtgatgatgagcggtgcgcggaacggcgcattacgggctttgtcgatagctttgtcatcactaccggcagcaatcgccccctgttccagtacggcgctgaaacgctcgcgcccttccccttcaatcacaaaaaaatgccacggttgcatggacttatggtccggcgcacgcatacccgcacgcaggatgttttgcagttgttcacccgttggcgcgggttcagccaagcgggaggcgctacggcgattgatcaatagttcgagtgcatccatttgattaactcctgtcgtgatatttattcacaaaattaacacgagagtggattttgttacagcacagtccgcaattcctgctgacaagtaccggttgggtcattacgataaccacatctattgcgcctgtgacaggtgtgaccttaagttgggagaatacatgcgaaccctttggcgatttattgccggattttttaaatggacgtggcgtctgctgaatttcgtccgtgaaatggtacttaacctgttctttattttcctcgtactggttggtgtggggatttggatgcaggtcagtggtggtgattcgaaagaaacggccagtcgtggcgcactgctgctggacatttctggtgtgatcgtcgataaacccgacagttctcagcggtttagtaaattaagccgccagctgcttggtgccagttccgatcgtctgcaggaaaactcactgtttgatatcgtcaacactattcgccaggcgaaggacgaccgcaatatcaccggtattgtgatggatctgaaaaacttcgcaggcggcgaccaaccgtctatgcagtacatcggcaaagctctgaaagagtttcgtgacagcgggaaaccggtttatgccgttggcgagaactacagccaggggcaatattatctcgccagtttcgccaataaaatttggctgtctccgcaaggcgtggttgatctgcacggctttgccaccaacggtctgtactacaaatcgttgctggataagctgaaagtttccacccatgtgttccgcgtgggtacgtataaatctgccgttgaaccgtttattcgtgatgatatgtcaccggcagcccgcgaagctgacagccgctggattggtgagctgtggcaaaactatctgaatactgttgccgctaaccggcagatccctgctgagcaggtattccctggcgcgcaagggttgcttgagggtttaaccaaaaccggtggcgataccgcgaaatatgcactggaaaacaagctggtcgatgcactggcatcgagtgcggaaatcgaaaaagcactgaccaaagaattcggctggagtaagactgataaaaattatcgcgccatcagttattacgattacgcattgaaaacgccggcagataccggtgacagcatcggtgtcgtctttgctaatggcgcaattatggatggcgaggaaactcaggggaatgttggcggtgataccactgcggcacaaatccgcgacgctcgccttgacccgaaagtgaaagcgattgtcctgcgtgttaatagcccaggcggcagcgttaccgcgtctgaagtgattcgcgctgaactggcagcagcccgggcagcgggtaagcctgtggttgtatcgatgggcggcatggcggcatctggtggttactggatttccacgccagctaattacattgtggctaaccccagcaccctgaccggttctatcggtatcttcggcgtgatcaccaccgtagaaaatagtctggattcgattggtgttcatactgatggtgtctcaacttcaccgctggcggatgtttctatcaccagggcactgccgccggaagcgcagctgatgatgcagttaagcattgagaatggctataaacgctttatcacgctggttgctgatgcgcgtcattcgacgccggagcagattgataaaattgcccagggccacgtctggaccggtcaggatgcaaaagctaacgggctggtcgatagtctcggggatttcgatgatgcggtcgccaaagcagcagagctggcaaaagtgaaacagtggcatctggaatattacgttgatgaaccgaccttcttcgacaaagtgatggacaacatgtctggttctgtccgggcaatgttgccagatgcgttccaggccatgttacctgcaccgctggcctcggtagcctctaccgttaaaagtgaaagtgacaagctggccgcgtttaatgacccacaaaaccgttatgcgttttgcctgacctgcgccaacatgcgttaagtcttgtactgagtggccgacagatcgtcggccacattattttttacgtcgacgaatcctcttcccgctgtttcgccccatatttccttatccgcatagtatcaggtgcgctccccctgcctcacgtatatacttttgctctttcgatatcattcatatcaatatcatgcaaaagaaatcaatttacgttgcctacacgggcgggaccatcgggatgcagcgttccgagcagggttatataccggtgtcaggtcatctacaacgccaactggcgctgatgccggaattccatcgcccggagatgccagatttcaccattcatgaatatacgccgctgatggattcttcagatatgacgccggaagactggcagcatattgctgaagatattaaagcgcactatgacgactatgatggttttgtcattctgcacggcaccgacacgatggcgtataccgcctctgcgctgtcgttcatgctcgagaatctcggtaaaccggtcattgtgacagggtcacaaatcccgctggctgagttacgctctgacggacaaattaatctgctgaatgcgttgtacgttgcggcgaattatccgatcaacgaagtaacgctctttttcaataaccgattgtatcgcggcaaccgcactaccaaagcccatgccgatggttttgatgcgtttgcctctccaaaccttcctccgttactggaagcaggtatccatattcgtcgtttgaatacgccacccgccccgcacggtgaaggggaattaatcgttcatccaatcaccccacaaccaattggcgtagtgacgatttatccagggatttctgctgacgtcgtgcgcaattttctgcgccaaccggtgaaagcattgattctgcgctcctatggcgtgggtaatgcgccacaaaacaaagccttcctgcaggaattacaagaagccagcgatcgcggtattgtggtggtcaacctgacacaatgtatgtccggtaaagtgaacatgggtggttatgccaccggtaacgccctcgcccatgccggcgtaattggcggtgcagatatgactgtagaagccacgctaaccaaactgcattacctgcttagccaggaactggatactgaaaccattcgcaaggccatgagccaaaacctgcgcggcgaactgacgccggatgattaaggagactgtaatgccccctcgcgccctgttactggtcgatttacaaaatgatttctgtgctggtggcgcgctcgccgtgccggaaggtgacagtacggtggatgtcgctaaccgcctgattgactggtgccagtcgcgcggtgaagcggttatcgccagtcaggactggcacccggcgaatcacggcagttttgccagtcagcacggtgtagagccttatacgccaggccaactcgacggtttgccacaaaccttctggccagatcactgtgtgcagaacagtgaaggcgcacaattacatccgttactgcaccaaaaagcgatcgcagcggtgttccataaaggcgaaaatcctttagttgacagttacagtgccttttttgataacggccgtcggcagaaaacctctctcgatgactggttacgcgatcatgaaatcgatgaattgatcgttatgggcctggctactgactattgcgtgaagtttaccgtgctggacgcgttacagttaggttataaggtaaacgtgattaccgatggttgtcgtggcgtgaatatccagccccaggacagtgcgcacgcgtttatggagatgtcagcagctggggcaacgctatatacgctggcagactgggaagagacacaggggtaattttacgctggcctacaattctgtactggcattgtaggccaaataaaacacgtcagtggcacatctggcaattgatgccatcaacgaaagatttaattcacctcagaaatctcttccaacgacaccttccgcgtttcgatgccaaaaatggagagaaccagcgcacagagcaataacatgacaccaagtaccataaacaccgtgatcgacccataatgtgttaataatgccgcaacgccatagggcgtgaagactgcgacgatccgtccgacggcattaacgaaacccgaaccgcgcaggcgtaaatgcgttggccaaagctccgggatataaaccgccgacgcgaagcaaacatacatgtataaaaagaagatcatcaccagtccatagattaaaatcgcccactctgtagtctgaattgaatagatatagcctaacacggcaataataataagtaaggtggagccaaataaccgacgaggaaaatgatcaataattaatgccgcaataaatattcctaccggagcgccaatcataataacagcggtcattaatattgatttatcgacatcaatgccggagttaacaaatatggtcggtatccatacggtgatggtataaagcgaaatgttcattgcaattaaaacagtaatcgcgactaatgtacgtcgtaacatttcacctttaaacaggagccagaaagtacccttgattactttaaccttgctgttgctctgatacgaagtaagcgggggtaaacgaatactcttctctctttcaatttgctgctctacttcacgaagttggcattctgcacctgcgatttgccctttccctgccagccatcgtggcgactcgataaagtatttacctgagagaaaccaggctaacagtatgccaataccacccagcagaaacattattcgccaactaaaaaaagcgataaccaccacgcctatcgccgcagacagcatgggcgaccagttaccaacaaatgagagccgcgcggaccattttccacgcaccgtcgcggggataaactccgtaaatgaggcatagccaaccataatcagcgcccccattcctgttcccatcaggaagcgaaagaagatgagccagtacatatcagggacaaaagcggcccctgttgcagcaataccgacgatgagaagatttatgcgaaacgccctgcgccgcccaaagtagtcaccaataaacccaccagtaagtgagccgatgaaataaccaaacattaatgccgaggtaaaggcggcattgaggaaattatttgaccatccattgcttaccagctttgctaagacgacattaccggagtaactcaaaaaccctgttaataacagactaaagcttttaataccaaatatacgataatgaaaccgggccaaaggcaagcggtccagtcttgcgccaatttgatcatattgttccattaggtgcctcggatttgctaaaaaggtagcaattgcggcaaattcacttgccgcatctttatcatcattttatttcaaggcgcaggaacaaataatattgacaacgtgtgcttaaattaccacaccagctggatattattgtctttgcaaaatgctatccactctgcacccggtgatttatcagttattatgtaattaatatgactaaaatcagctaactggacaaaagctttgcgatcaaacttagagtgatcaaccaataacgcaacttctgtcgcctgacggatcattgtctttttgatttcagcttccgcttcattagagtccagcgcgccgctgttaatatcaagacctttacaactcattaccatgatatcgacatgatagcgcctgatgatctctttagtaattcttccttgcagtgaaagtgtatttttgtttagttccccacccgttgaaacgactttaatttctgactgagccagaacatgaatcgcttccgccgagttggttagcaacgtcaggccactacggtcctgtaacaatttgagcaattccattacggtactactggaatcggctgccatggtggttttattgtcgataaagggtagtgccttgcgtgcaataagctgcttctcttcataaaacgatgaagcgcgcttataaaaatggatattctccgtcaacatcgctgtatttaaaacagcaccaccataggttctggtcaaaaagccttcatcttccagcttctcaagatcgcggcgaatggtttcttcggttacctgaaaaatcccactcaaatttgagactgtcacctttttatcgttggcaaccatttgcttaattgcctgaatcctgtcttttgccgccacgattacacccctgtatctttttacatcacattagcgcgattatcgcataaccgatgtttactttcaaaataacctgtttgaatcacagattttcatcacagttttcacagaaacagaggtgaatcgtgttgagtatttaacgctccaggcctctgccatttccctcatcaatgttgcgtctgcatccgataagttgatattcagtgccgcgacattttcgcgtacctgttccggtgcagtagccccactaagaatggagattaaatcactctgttttaatatccacgccagtgccagagtgggaattgtgcactgataacgagcacaaagtggctgccactgttcaagcatatcaatcactttcagcatgttttcacgctggaaccagactttatttgcccgagcgccgcccggaacgtaatcacgagtgatggtgccggtcaacaatccctgctctagcggggaataaacctgaaccacaatgccattatcacgacatagtggcagcagttcgttttccattgcccggtcgaggatactgtatttcgcctgaataatatccagttcaccatattgcagatactcgcggatatggtcagcatcgacgttagcagcgcctatagcgcgaattttcccttcagactttaactcattaagcactgcgacagtttcagcgatcggcgtaaaaaatggcggcaccgactgccagtgcgtcatgtagatatcgatgtaatcaatacccagacgttgcaagctcgctgctacctcttcgcggatagattccggggaaaggtttttatacaactgccgatcgccaactttgttgaataaacttccttttcgttcccagacaatgccgcatttggtttctactacaacctgttcacggggcagtttttttaacgcctgaccgacgataacttcactattgccaaagttatatcctggcgcagtatcaatcagattaatgccacaacgatgggcttcaagaatcgtatcaatacatatttgccgatcgagatcgccattccatgcaggaccgccgccaatggcccatgtccccaaccccattcgcgaaagcgtaatatccgttgtgcctaaaggtatctttttcatttgccttcattatccttcgtattcttccagcaattgttcgaccagctttctgttttttacgccggtggtggcaccgacgcttagaaccgagatagccgccgttgcattggcaaagcgtgcgcattcacgcagatttttgccttctaacagtgccgcaataaaacctgaagcaaagttatcgccgcgccaatggtgtcgatggcggttattcctgcgaccgccggcaccttcatcgtcatgtcaccacgcttgataaagcagccgtctttacccgttttaatcaccaccgtttttacgccgcacgcaagaaagcagtcagcaatttcatccagtgtctctttcccggtgagtaattttgcctcggcaaaattaggaaacagataatcgacataactcaatgcttcgcaaatatcatccagcgtttcattcaaccgcggtttgatcatatcggcacagataatcatctgccgggctttagcttgcgtaaaaatttctgttagcgctttaccatccaatagtggactgttgaaaatactggccagtgataataatttcgcctgagaaaaccgcgcaaaatcaacatcgtcaatattcaatttccacagactgccattacggtttgtgacaaacgtccgctcgccatcctccgtcaccagtccaacgttaatagaggtatctatgctgacgtcctgcttcaggctttgaatatcaatattctctttgcggcaatggtcgagaataaattgccctgcggcatctttaccaatacgactcattaatgctgtgcgatggcccagacgagaaataattgttgcttcatttattgcatcacccccggtggtcattgcgattctttcaagaggataagaatccacatcaaagatatttttactgaccggttgcaatggaatatcaacaatagcggcacctatacaaataacgtcgagattatccatatcattattccgctttgccatcagaaccgaacagtttaattttttccaatgcccgttcttttacagctttacgtacttcacgttctaaatgcaggaaaggctgatcctggttttctttcactgcaaccattgcggcctgacagagctccgtatgaatgttgattttcgcgatacccaacgaaattgcagttttaatgtcggcatcactgatccccgatgcaccgtgcaaaaccagcggaacagaaacggcatcgcgtacgcgtttgacgacctcaaagttcaattgtggctctgacgtataaaccccatgctggttgccgatggcgacagccaatgaatcacagcccgtacgttcaacaaattcagccgcctggtcaggatcggtatagtgatagcccgccagcgcttcctcataaacggtttcattaccgacatgccctaattccgcctctaccggaatacccagcggatggaagaaatcgacagcctctttggttaaacgaatattttcttcgaaatcaaacgcggaagcatcacgcattaatgaattcataccatgagtccaggcgttatgaataatctccatactccgaccatgatcccaatgagttattaccggcaccgttgctttttgtgccattgataccatcatgtgagagaaatcttcaaatgaggtgttaccgacaaaacctgtaccaaaagaaataataaccggggatttcgcttcttcggctgcgtcgataacgcccatcaacatttctgcattacatacgttaaaatgggcaattgcataatgtttatttgtggcatcgttttcccaatatctgatatctgcgagcatgttctgttctcccgtattaattaatcgctaattttaataacgcctttaataatgtcgcgtttgttgttaactgactcttcaaatgcctgttgtacatcccgataatcgtaaatatgcgtcaccatcgatttcacatcgaatcgccctgaagaaatagcttcaatcgtgaccggataacgattggcatagcggaataccgtctggatagtgacttcgcgattgattttgaggaaattgattgccgaatcgccgggtacagtaccaacaatcataattttaccgccgcgcattaccagataaggtgcctgtttaacggtgaccgcagaacccgctgtttcgaaaacaatatctgcgcccatgtcttcggtaaattgctgacagcgtgcaatagtgtcttcttttgcgccgttaataaccactgtcgcaccaagctgttccgccattgccagacgtttttccagcacatcaacgacggcaatttccgttgctcccaggcatttgcacgcttgcaacgtcatcaaaccaatacaacctgctcccagaataattatcttcttacccggtttaacatctgccagcatcgcggcatgcatcccgactgcggcaggctccaccagcgccccttccatcgtgtccatattgtcgggcagtttgtaagtaaagctctccggatgacacagatagtgcgttaatgcgccgcggtagttgggttgtgtcgccataaaatcaacgtccgggcagatgttatatttgccttccagacagtaacgacagtgaccgcaaggaacgccaggttcgatatttacccgatcccccggtttaaatttgcgcacgcggcttcccacagccacaaccgtcccggcgcattcatgacccaggccaatttcttgatttgggtctttaggcggaataaacgggcctgattcaaaaccatgtacatctgaaccacaaataccgacatattctactttaatcaaaacttcatcttctttaggcactggtatttctgctgaaataattttcattgtgcccggcacctgcaatattgcttttgaatttttcattttgaatccacccgtattatttattggctactgcatcaatacttaaactttcaacggagacacctttggtttcgattccaatggtggcgatagcaattgcgacaataattgaaaccgcccccagaagaataaagactcccgtaacgccataactactgagcagcactgcaacggcataaggtgcggcaataccactgattcgccctaccgcattcgccagaccggagccacggagtttggcctctgtcggccagatttcagggacatacactgccgaggcatagcaaacgtacatatagacgaaagtaatcaggaagaaaccaatcaacgttatgagcaacatactggtttgcagtgaatagatatatccgagcaccgcaatcaggattaatagccccacacccattgttttacgcggaattttatccatcaccagcatggcaataaaaataccaaatggcgcgccaaacatactcatggtatttaaaacaatcgagtcttttaaattaatcccctgggtcatgaatattgttggcaaccagttaattagtgtgtactgcacaacgttcatggcaatcagcacacaagagcctaatatcacgcgtttcagtaatactcctgtcagtaaggctgaatacggcaccgcttgtggcgctttaccgtcatcagcaataaccacaggcggcaaaggtttacccgtctggcgtatgacgccttcttctatactccgcatgactttctcggcttcctgataccgtccgcgcgattccagccagcgcggggattcaggaaagtagcgccaggccagcgccgtagcgataagcgacaatattgcagggataagcagttgtacccgccagttccactctgcactaatcagcggcgtgagtcccatcgctatcaatgaacagagcggatatgaccagttgccaataaaggaaacccgacttgaccacgttccacgatttctaccgggcatatattcggtgaaaccagcaaacagcgtaaccagtaaagctcccagcccaactcccatcacaaaacggcaggcaataaggaaatccatattcggtgagaaagcaccgacaaccatcgaggcaatatgaatggcctcatagaggatgaacgcatttctgcgaccggttttgtcgccaatgatgccgcccaccagcgcaccgagaaacattccggcggtcgtgattgctgagaatgtggctgtggtggaattatctgtccagcccaacgctttcagctgcgcgaggatcaagccaccaacggcattactccagcagacaagcaagccaaacgcgacgatggcaaacattgatgaatgccagcggcaatccggtaagcgatccagccgtgcaccacaatgcggttttgttatctgttccatgcgataacgttccttcaggagagtggttattcatcaaagtcgtaagtcatgatcactttgattgcggttttatcgaccatcgcatcaaacccttcgcgccattgcgacaggccgatacgatgcgtgatcatcggtttgactttgatagcgccgctggctaatagcctgatagcgttacgccatgaggtggagtcataggccatatgcccaatgatgcttttgttccaggcggtaatgtcattaatcgagaaatcaagaggtttgaagcccattccaacgcgtaccacttccccgttcgggcggagcatttcgatggcttgtttcagtgcgatattggcaccggagcattcaatcaccagtcccagattgtctttgccacaaatttgctggcagcgcgccaccacatcttcggtagaaccatttactactgccgtcgcacccagttcttttgcaaccgggaagcggaccgccacatcttcttgcagaccaacgacgacgatatttaccgcccccataattcgcgccatttgtacggagaacagcccgagtgggccagtgccgatgacgaccacatcctgaccaggaaggaatttcgattgctgcgcgatggatttgtaggcattacagatagggtcaagtacggctgcgtcctcataatcaacaccatcagggatttcccacaacgcatgacgatgaattttgagaatttcaccaggaaccagacaatatttggaaaaaccaccgccccaggtattattatccagaccaaggtttactttttctgtacaacacagaaaatcaccttgttcacaggccggacaaacaccgcaaacgtgaccgctgttatccgatacgacgcgttgccccactttccagtctttgactttttcaccaacctgcgcaatacaacctgcgaactcatggccgcggatagagttaaactcatcagaaccgctatcgacattgtagtgcttcatgtctgcgccgcagattgccgcggctttaatttcaatcactacatcttccgggccacacatgggttgtgggacatcaatcatcttgtagccgccaaaggccttgccaaaccgagccagtgctttcattgcgtcatcctctgtgtttagttttgcttagatggccatcatacttacccacatgatttttgaggtcaacattaaatctgtaaaacacagataataatctgcgttttacaactcagatcacaattacgcagaaaatggctgggtctgttacaggttgatggaaggcggggcgcaaaaagagcaaattcgagagggattaccggccaaataggtctgagacttaagttcaggagaagtcattcaggtgtgaacgggacggcaagagatcggactgggacttagccaggtcatggcgagataattgagatgagtcgtggggtcattgttggctatccccttcatagccgaggcaaaaaggggatgaaccacttacttaaacatggcaataggctttgctgagataccaaaatcttcttttaactgctgtttgctcttcatgaccatctgaccatttgtgtcaattgtcatatgctgtgcttcgatattatggcgggcttgccacagcatcaccagttgcaggcagttctctttttgttcctcggtcaacgcaacgccatcaggccatttccccagttcaacggcggtcgacaaacgctggtatacctcaggcatcatgctgttgataatgtcatcaagattcataatttttccgctcctgtggaataagttgctgaatcgttttttcaaccgttgatttcttcgccgttttcgccatcggtaaagcgtaaagaggcagagttaacacaataacgttcgcccgttggctgcggcccgtcggggaagacatgccccagatgggcatcacagttaccgcaacgaatttctatgcgctgcattccatgtgacaagtctttgatataacgaatggattcttcacttaccggttcgtagaaactgggccagccacagccggaatcatacttggtttgggaatgaaacagcggggcatcgcagatcaaacagtgatatacgccgtcacgcttgttatgcagtaaacgacccgtaaatggcggctctgtcccatgattctgcgtcacgtaaaactgcatctcggacaaattttttttcagttcttctgccgaaggtttattagccatttgctcacatctcactttaatcgtgctcacattacgtgactgattctaacaaaacattaacaccaactggcaaaattttgtcctaaacttgatctcgacgaaatggctgcacctaaatcgtgatgaaaatcacatttttatcgtaattgccctttaaaattcggggcgccgaccccatgtggtctcaagcccaaaggaagagtgaggcgagtcagtcgcgtaatgcttaggcacaggattgatttgtcgcaatgattgacacgattccgcttgacgctgcgtaaggtttttgtaattttacaggcaaccttttattcactaacaaatagctggtggaatatatgactatcaaagtaggtatcaacggttttggccgtatcggtcgcattgttttccgtgctgctcagaaacgttctgacatcgagatcgttgcaatcaacgacctgttagacgctgattacatggcatacatgctgaaatatgactccactcacggccgtttcgacggtaccgttgaagtgaaagacggtcatctgatcgttaacggtaaaaaaatccgtgttaccgctgaacgtgatccggctaacctgaaatgggacgaagttggtgttgacgttgtcgctgaagcaactggtctgttcctgactgacgaaactgctcgtaaacacatcaccgctggtgcgaagaaagtggttatgactggtccgtctaaagacaacactccgatgttcgttaaaggcgctaacttcgacaaatatgctggccaggacatcgtttccaacgcttcctgcaccaccaactgcctggctccgctggctaaagttatcaacgataacttcggcatcatcgaaggtctgatgaccaccgttcacgctactaccgctactcagaaaaccgttgatggcccgtctcacaaagactggcgcggcggccgcggcgcttcccagaacatcatcccgtcctctaccggtgctgctaaagctgtaggtaaagtactgccagaactgaatggcaaactgactggtatggcgttccgcgttccgaccccgaacgtatctgtagttgacctgaccgttcgtctggaaaaagctgcaacttacgagcagatcaaagctgccgttaaagctgctgctgaaggcgaaatgaaaggcgttctgggctacaccgaagatgacgtagtatctaccgatttcaacggcgaagtttgcacttccgtgttcgatgctaaagctggtatcgctctgaacgacaacttcgtgaaactggtatcctggtacgacaacgaaaccggttactccaacaaagttctggacctgatcgctcacatctccaaataagttgagatgacactgtgatctaaaaagagcgacttcggtcgctcttttttttacctgataaaatgaagttaaaggactgcgtcatgattaagaaaatttttgcccttccggtcatcgaacaaatctcccctgtcctctcccgtcgtaaactggatgaactggacctcattgtggtcgatcatccccaggtaaaagcctcttttgcattacagggcgcacaccttctctcgtggaaacctgcgggtgaagaagaagttctgtggttgagcaacaacacaccgttcaaaaatggcgtcgctattcgcggtggcgtaccggtttgctggccgtggtttggtccggcggcacaacaaggtctgcctgcgcacggttttgcccgcaacctgccgtggacgctgaaatcacatcatgaagatgctgatggcgtagcgctgacttttgaattgacgcaaagcgaagagacgaaaaaattctggccgcacgactttacgctgttagcgcatttccgcgtgggtaaaacttgtgaaatcgatcttgaatcacatggcgaatttgaaaccacctctgccctgcatacctactttaacgtgggtgatatcgctaaggtaagcgtcagtgggctgggcgatcgcttcattgataaagtgaatgacgcgaaagaaaatgtactgaccgatggtattcagaccttccctgaccgtaccgatcgcgtgtatctgaatccacaagattgcagcgtgattaatgatgaagcgctgaatcgtattatcgccgtaggccaccagcatcatctgaacgttgtcggctggaacccgggaccggcgctttcaattagcatgggcgatatgccggatgatggctacaaaacatttgtttgtgtagaaacggcttacgcttcagaaacgcaaaaagtgaccaaagagaaacctgcacatctggcgcaatccattcgcgttgcgaaacgttaatttacgttaatgttgtgtgccgggtgcaatgcatccggcacacaacatcacaccatatccagcgcagtttttccttttggtgccggatatgccttatccagcatagctaattccgctgaagaaagttcgacctcaagcacagccgcattttgttggacatgggcaatcgtggccgcttttggaatcgccatcacaccctgatgactgatcacccacgccaacaatacttgtgccgcgctgatattgtgagcatgtgcaatttcgttgactaccgcgttttttaacagtccattgcgcaaccgcccggcctgggctaacggactgtaagccatcaccggcatctgctgttgctggcaccaggggagtagatcgtactcaattcctcgtgaaccgagatggtaaagcacctgattagtggcacactgatttccccccggcagctgccagagttcctgcatatcagcataatcaaggttagaaacgccccagcggcggatttttccctgggcgatcaatttttccatcgctgcgacagtctcttcaaaagcgaaactgccagaccagtgtaataagtaaagatcgagataatcagtattgagacggcgtaaactggcttcgcatgcatttatcgctttttgcccgccagcattccacggatagactttagagacgagaaagaccttctctcgcagaccggttaatgcttccccaaccaccttttcggcaccgccatcggcatacatttcggcggtatcaatgagggttaaaccgagttcaatgcccgcgcgtagtgcagcaacttctgttttgcgctgactggcatcttcgcccatataccatgttccctgccctacggctggcagtgagacatcgccactaaattgaatcattttttgttgcattgtttcctcccaggtattgcaccaccgtaatgcaaaacagggcgtgacgccctgtttttatgcacaaaatgccctggaaagatgcattatcagaatttgtaggtgatcccggtagaaatcaggccagtccaggatttatccaccatcgggctgtcagtaacttcatcagacagacgggtgtagcgtgcggtaccgtaaacactccagtcgccgaggaagttgtagctggcgctcagctccaggtaagggctccagctgtcgttcgggttatagccacgcagaccgctgcgagcggactctttgcgcgatacgccataatagtattcgttctggttttcgctgttccactgcacaccaatacccggagtcacggtcaggccaccgttggtgtaacgatacaaccaggccatatcccagacgatgccgttgctgttatccagggtatcgccagccagggtggtacgcaggtaaccgtactgggtaaagtgagcataagacagaccagccatcatggtgctcttacggtcatccaggtgacgcatttggtgatcgccactgtctttcgctttgaagtaaagcggcgaccagtaagcggtaattgaaagtttatccgttgcgtcattccacaggtagtaaccaccacctaagccacggaaccagaagttatcgccttcatagttgattaccggtactgggtaaacatcggtatcgtaatctttatatgggtgttcaacgacacctacgcctgcgcccagggaaaatttaccttcagcgtgcgctacgcctgcagacgttgcgataagcactccaagtgccagaagtttgagtttggtcacaattaatcattccttaaacaaatgtttagcgggcgacaaagtttacccgtcaatacatcgaaacccaacctttttacgttttcattttttaaagtaactgtttaattttcctgacgcggatgacaccgcgcttacagccaaatgaatttagcgttactggcgagcctggtctttacattaattatgcaaaatttatggatgagttgttgatatgccattgaaattaagaaagccgtgcaggcaagttttccatttgccatctacgcttaattttgaaggtgtatcaccgggcacgttgttctcatcgtcgataaaatggcatgagagttgctgtgttttagcaagagacgtcgttcagtttacctcttccgggagcctctactattcatatgaacggctcttaacctgtgctaaaaaacgaaaggacggcataccatgaatatattcgatcactatcgccagcgatatgaagctgccaaggacgaagagttcacactgcaggagtttcttaccacttgtcggcaagatcgcagtgcttatgccaacgcggctgagcggctattgatggctatcggtgagcctgtcatggtcgatacagcccaggaacccagactttctcgactcttttctaaccgggtcattgcacgttatccggcgtttgaagagttttacggcatggaagacgcgattgaacagattgtctcttatctgaaacacgcggctcaggggctggaagagaagaaacaaatcctgtatctgctggggcctgtgggtgggggtaaatcatcgcttgctgagcgactgaaatcattaatgcagctcgtaccgatttatgtattgagcgcgaacggtgagcgtagcccggtcaacgatcatccgttctgtcttttcaatccgcaggaagatgcgcagattctggaaaaagagtatggcattcctcgccgttatctcggcaccatcatgtcgccgtgggcggcaaaacgcctgcatgaatttggtggcgatatcactaagttccgggtagtgaaggtctggccgtcaattctgcaacaaattgctatcgccaaaacggaacccggcgatgagaacaaccaggacatctccgcgctggttgggaaagtcgatattcgtaaactcgaacactacgcgcagaatgacccggacgcctacggctattccggtgcgctgtgccgcgccaatcaggggatcatggaattcgttgagatgtttaaagcaccgattaaagtgctgcatcccttgttaaccgccactcaggaaggtaactacaacgggacggaaggtatctccgccctgccgttcaaggggattattctcgcacactcgaacgagtccgaatgggtcactttccgtaataacaaaaacaacgaagccttcctcgatcgtgtttacatcgtgaaggtgccgtattgcttgcgcatttccgaagagatcaaaatctacgagaaattgcttaatcacagtgaattgactcacgccccatgcgcccctggcacgctcgaaacactgtcacgtttttccattctttcgcgcctgaaagagccagaaaactccagcatttattcaaagatgcgggtttatgatggcgaaagtctgaaagacaccgatcccaaagccaagtcgtatcaggaatatcgtgactacgccggtgtcgatgaagggatgaacggtctgtcgacgcgttttgcgtttaagatcctctcccgcgtgttcaacttcgatcatgtagaagtggcagcaaacccggtccatctgttctacgtcctggaacagcagattgagcgcgagcagttcccacaagagcaggcagaacgctatctggagttcctgaaaggttatctgatcccgaaatatgccgagtttatcggcaaagagatccagacggcctaccttgaatcctattccgaatatgggcaaaacattttcgaccgttatgttacctacgcggatttctggattcaggatcaggagtatcgcgatccggataccgggcagctgtttgaccgcgagtctcttaacgccgagctggagaaaatcgagaaaccggcggggatcagtaatccaaaagatttccgcaacgagattgttaacttcgtactgcgcgccagagcgaataacagcggacgcaatccgaactggaccagctatgaaaaactgcgcacggtcatcgagaagaaaatgttctccaataccgaggagctgttgccggttatctcgtttaacgccaaaacgtcaaccgacgagcagaagaaacacgacgactttgtcgaccgtatgatggaaaaaggctacacccgtaaacaggtgcgtttactgtgcgaatggtatttgcgcgtacgtaaatcgtcttaacaaccctggcccggtacacatgttaccgggcctacaacgacagcgaaccgtgggcctgagaagcggcaacacaggcgtagcatacagttggcaaatgtagtacggggggcatatgacctggtttattgaccggcgtctgaacggcaaaaacaaaagcatggtgaatcgccagcgttttttacgccgttataaagcgcaaattaaacagtcgatctccgaggccattaataagcgttcggtgactgacgtcgacagcggcgaatccgtatccattcccacggaagatattagcgaaccgatgtttcatcaggggcgtggcggtctgcgccaccgcgtgcatccgggcaatgaccatttcgtccagaacgaccgaattgaacgtccccagggtggcggcggaggttccggcagtggtcagggccaggccagccaggatggtgaaggtcaggatgaatttgtctttcagatttcgaaagatgagtatcttgatctgctctttgaagatttggccttaccgaatctgaaacaaaaccaacaacgccagctgaccgaatataaaacgcatcgggcgggttataccgctaacggcgttccggccaatatcagcgttgtgcgttcattgcagaactcactggcgcgacgcacagccatgacggcaggcaagcggcgggaacttcatgcactggaagagaatttggccatcatcagcaacagtgaacctgcgcaactgctggaagaggaacgtctgcgcaaagaaattgcagaattacgtgccaaaattgaacgcgtcccttttattgacaccttcgatttacgttacaagaactacgagaagcggcccgatccctccagccaggcagtgatgttttgcctgatggacgtttccggttcaatggatcaatccactaaagatatggctaagcgtttttatattctgctgtatctgttcctcagcagaacgtataagaacgtggaagtcgtatacatccgccatcatacccaggcgaaagaagtcgatgaacatgagtttttctactcgcaggaaacaggcggcaccattgtttccagcgccctgaaactgatggatgaggtagtgaaagagcgttataacccggcacagtggaatatttacgctgcacaagcatcggacggcgataactgggccgatgactctccgctttgccatgaaatcctggcgaaaaaattattacctgttgttcgttattacagctatatcgaaattacccgtcgtgcacatcagacattgtggcgagaatatgagcatctgcaatctactttcgacaactttgcgatgcagcacatccgcgaccaggatgatatttatccggtgttccgtgaactgtttcataaacaaaatgcaacagctaaaggctaaaactatcagccaggtcattatcgcctggctgatttttagcttactgtaaattatctcatttattacatacattagcttacaatcgctttaaatatgacagcataacctttacataatttagttccagaaaacaatcattcggaaaaatgattcagtcaacacgtatttccatggggttattctttaaatattttttatcgttaacgaaaattgatcctggtcaaaactatatatctctgccatcaataaaatccagcactcacattgctctcctttttatggtttctatgggtacacaaaaattaaaagctcaaagcttttttattttcagtttattgctgacgttaattttattttgcattactaccttatataacgaaaacacaaatgtaaaactcatcccacagatgaattacctgatggttgttgtggctttgtttttccttaacgccgtcatttttcttttcatgttaatgaaatatttcactaacaaacaaattttaccaacactcattttaagccttgcatttttaagtggccttatctatttagttgaaaccattgtaattatccataaaccaattaacggcagtacactgatccagacaaagtcgaatgatgtttctattttctatattttccgccaactcagttttatttgtttaacctcgctggcgctcttttgttatggaaaagacaacatccttgacaacaataagaaaaaaacgggaatcctgttgctggcgctgattccttttttagtttttccccttctggcacacaatctgagcagttataacgctgactattctttgtatgtcgtcgattactgtccggacaaccatactgcgacctggggaatcaactatacaaaaatattggtttgtctgtgggcatttttactgttctttattatcatgcgcacacgattagccagcgaactatggccgttaatagcattattatgtctggcatcgctatgctgcaacttacttctactgactctggatgagtataattatactatctggtatatcagtcgcgggattgaagtttccagtaaactgtttgttgtgtcttttctgatttataacatttttcaggagctgcaactctccagcaaactggcagttcatgatgtgctgaccaatatttataatcggcgctactttttcaacagcgtagagtcattattgtcgcgacctgttgttaaggacttctgtgtcatgctggttgatattaatcagttcaaacgcatcaatgcccaatggggacatcgtgtgggtgataaagtgctggtttcaattgtcgatattatccagcaaagcatccgccccgatgatattttagcgcgactggagggtgaggtgtttggcttgctatttaccgaactcaatagtgcccaggcaaaaatcattgcggaacgtatgcgtaaaaatgtcgaactcctgaccggctttagtaacagatatgatgttcctgaacaaatgaccatcagtattggcacggttttttcaacgggtgacacgcgtaatatctcgcttgtcatgacggaagcagataaagccttacgcgaagcgaaaagcgaggggggcaacaaagtgattattcatcatatttaagtgcaaaaatattcagagccatgctttttgcgtggcttttgcatacaatttattactattacccctaaatttcccctccccagcggcgcagagatgagtataattagcgcccctgtgccaggccgcaatcgaactttatctggttttctcgtttcactaaccgaaggagtgccatttatcatgaaattgcaccatagaatgctccggcattttatcgccgcaagtgtcattgtgctgacatcttccttccttatttttgaacttgtcgccagcgacagagcaatgagtgcctatctgcgctatatcgtgcagaaagcagactcctcctttctttatgataagtatcagaatcagagtattgccgcgcatgtgatgcgcgctctcgctgctgagcagtcggaagtgtcgccagaacagcggcgcgccatctgcgaggcttttgagtctgccaataacacccatggcttaaacctgactgcccataaatacccgggcttacgcggcacactacaaaccgcatccactgactgcgacacaattgtggaagctgcagcactattacccgcttttgatcaggcagtggaaggcaaccgccaccaggatgattacggttcaggtcttgggatggccgaagagaaatttcactattatctcgatctcaatgaccgctatgtctatttttatgagccggttaatgttgaatactttgcgatgaataactggtccttcctgcagtcaggaagtattggcatcgatcgcaaagatattgaaaaggtatttaccgggcgtaccgtattgtcgagcatttaccaggatcagcgtactaaacagaacgtgatgagtttgctgacgccggtatatgtcgcagggcagctaaaagggattgtgctgctggatattaacaaaaacaatctgcggaatatcttttatactcatgaccgccctctcctctggcgttttctcaatgtcacgctaaccgataccgattcggggcgcgacattatcatcaaccagagcgaagataatctgttccagtatgtcagttacgtccatgacttaccgggcggcattcgtgtctcgttatccattgatattctttactttatcacgtcttcgtggaaaagcgttctgttctggattttgacggcgttaattttgctgaatatggtgcggatgcacttccgtttataccaaaatgtgtcgcgagaaaatattagtgatgcgatgactggactgtataatcgcaaaattttaacccctgaactggagcagcggttgcagaaactggtgcaatccggttcttcggtgatgtttattgctattgacatggacaagttaaagcaaataaatgacaccctcggtcatcaggagggggatttagcgattacgttattagctcaggcgattaaacagtcgattcgtaaaagtgattatgccatccgactcggtggcgatgaattctgcatcattcttgtcgattcgacgccgcaaattgcagcacaactgcctgaacgtatcgaaaaacgtctgcaacatatcgcgccgcagaaagagatcggcttctcttccggtatttacgcgatgaaagaaaacgatacgttacatgatgcgtataaagcttccgatgagcgtttatatgtcaataagcagaacaaaaacagccgttcatgataaccttctgtggttgtttgcttgtaatctcaggagcgtgaaatgactgaaatggctaaaggaagcgtgacgcatcagcggttaatcgctttattatcacaagaaggtgctgacttccgcgtcgttacccatgaagcggtaggtaaatgtgaagcggtgtcagaaattcgtggcaccgctctaggccagggtgctaaggcactggtatgtaaagtcaaaggcaatggcgtaaatcaacatgttctggcgatcctcgcagccgatcaacaggccgatctgagccaactcgccagccatataggcggattacgcgcttcgttggccagcccggcggaagtcgatgaactcacaggctgtgtcttcggcgcgatcccccctttcagcttccatccaaaactcaaactggttgccgaccctctactcttcgaacgatttgatgaaatcgccttcaatgcaggcatgctggataaatccgttattttgaaaaccgcggattatttgcgcattgcgcaaccagaactggtcaatttccgccgcactgcgtaactagccggtccgttcgataagaagaacggacaaaaccagtacaacagcaatggcaaaaaacgatgacgtgataatcagtgtctcgacaaacatttgatcgttcatagcatgcccccgggagatagctgttttcacgttattgttagcgtgcacaaatggcagtttgatgacagttcgcctgattttttatgcaaaaaacgtaaagattttctacttccttcctgcagcaagcgtaaagtaagcaggcttattattttttggcaaggaaaccacgatgtttgatgtcactttgctgatcctgctcgggttagctgcgctgggctttatcagtcataacaccactgtcgccgtttcaattctggtgttaatcattgtccgcgtcacaccgttaagcaccttttttccgtggattgaaaaacaggggctaagtatcgggataatcattctgacgattggcgttatggcccccatcgccagcgggacgctaccgccctcaaccttgattcactcgtttctgaactggaaatcactggtggcgattgcagtaggcgtgattgtctcctggctgggtgggcgcggcgtgacgttaatgggcagccagccgcaactggtcgccgggctgctggtaggcactgttttaggcgtagcgctgtttcgcggcgtaccggttgggccgcttattgccgcgggtctggtttcgctgattgtggggaaacagtagttaatctcgcaatatatcggcctggcgtttgccccaggcctttcttaaacatagtaataaaggccgttgttgaatcataccccagcgtatgagcaactttctgtacagtatcgcctttcactaatccctgaagcgccataatcagctgtaactgctgacgccactggcgaaaactcaaccccgtctcttttactatcagtcgggcaagattgcgttcactcatcgcaaaaaagccagcccattgccccaatgccccccactcgacaggccctttcgccatcatctccaccatcgtgcggattttaggatgagaagaaacgggcaggtgcagctgttgttgtggctgctgagggagttcatcaaacaggacctgaattaatctgcgggtcattggctcagcacgctgagtcgtcgtcctgtttgccagggttaaaattaattcccggcataagggcgatattttcaatgtgcaacatgttgtcggcattgtcactgcgctgggttcgataaacagaaaacagagttcagcattagctgttacttgattgctatgttccaccccgcccggtatccaaaccgcatattgtggcggcaccatccacaaagcattttccaccgtacaggtaattgcaccatgtagcgccagtatcagctgtcctttgcggtgctgatgtacaggactggttaactcatccgttccggcgtgaatacaaaatgcgaccgcggcttcatggtgtcggtcgggttcatagccattgagattcaacctgtgcatcattttgtccgaacttagcgataatttgtcattttagcttgattcaacataacaataaaaacggtaaggtacagcctcgtttgtaacaatgagaagcatatgacctgttcaacttcattaagcggcaaaaacaggattgtccttatcgctggcattctgatgattgccacaacattacgcgtcacctttaccggcgcagcaccgttactggatacgattcgttccgcttactcgctgacgacagcgcaaaccggcttattgaccaccctgccattattggcctttgcgctaatctcacctttggctgccccggtagcgcgacgttttggtatggaacgtagcctgtttgccgcgttacttttgatctgtgctggtatcgcaattcgctctctcccttcgccttacttattatttggcggtacagcggtcattggcggtgggattgcattaggcaatgtcttactgccaggattaattaaacgcgatttccctcattccgtcgccagacttaccggcgcatattccctgacaatgggagctgcagcggcactgggatcggctatggtcgtgccgctggctttgaacggttttggctggcaaggcgcgttgctcatgctgatgtgttttcctctgctggctctttttttatggctgccacagtggcgaagtcaacaacatgcaaatttgagtacctcgcgcgccttacatactcggggtatctggcgttcgccgcttgcctggcaggtcacattgtttcttgggatcaactcactggtctattacgtgattattggctggcttccggcgatcctcatcagtcacggctatagcgaagcacaggcgggttcactgcatggtttgctgcaactagccacagcagcacccggtttgctgatcccacttttcttacatcatgtgaaagatcagcgtggtattgcagcgttcgttgccttgatgtgcgcagtgggcgcggttgggctctgctttatgccagcgcacgcgatcacctggactctgcttttcggttttggttccggcgcaacaatgatactggggttgacgttcattggtctgcgggctagttctgcgcatcaggcggcggcactctcggggatggcacaatccgtcgggtatttgttggcagcctgtgggccgccgctgatgggtaaaatacacgatgctaacggtaactggtctgtaccacttatgggtgttgccatactttcactactgatggcgattttcggactttgcgccgggagagacaaagaaattcgctaatatccggtgctatagtgacgtaacaaatcatgcgtgaaagggagaacaaacacgatgaatattcagtgcaaacgcgtttatgatccggctgaacagagcgatggttatcgcatactggtcgaccgcctctggccgcgcggtatcaaaaaaaccgatttagcccttgatgagtgggataaagaaatcacgccgtcaacggaactgcgcaaagcctttcacggcgaagtcgtcgattatgcaacctttcgcgagcaatatcttgcagaactggcgcaacacgagcaagaaggaaagcggctggcggacatcgccaaaaaacagccgctgaccctgctctactcagcaaaaaacaccacgcagaaccatgcgctggtgctggccgactggctacgtagcttgtgattttagtacagcatccggcggttatttttcaccagccggatggtcacgccgccacaatgcccattcatcaatcgtttcaccgcccggtaatttgcaattgttgctgaccccttgcgctgtctgcactggaatgagcgtcccgcccttctgctggcaatagaccgacgccggatttgccataccaatctgcggcggtttaggtgcttctggctgagaaggggttgaacaaccagccaggaccagcaagcaaggcagaacaaaactgataattttcatttattgatctcacatatttatccaagattagagtatcgcggtatcgttttgttttgcagcactatttttattacattcactcaaaacatattacgtcttgtttcatctttgttgatgatgttttatcatgcctgcaaagattaaataatcagcatttacccgccgtatcctggagttgttccgtgtcagatcagattatcgcccgcgtctcgcaatcccttgccaaagaacagtcactggaaagtctggtccgacagcttctggagatgctggaaatggtcactgatatggaatcaacctacctgaccaaagtggatgtcgaagcgcgcctgcagcatattatgtttgcccgtaacagccagaaaatgtacatcccggagaattttaccgtctcgtgggattactcgttatgcaaacgcgccattgatgaaaactgctttttcagcgatgaagtccccgaccgttggggtgactgtattgcggcacgcaatcttggcatcaccacatttctgagcacgccaattcacttaccggatggatcattctatggcacgctttgcgccgccagcagtgagaagcgccagtggagtgaacgcgcggaacaggttttacagttattcgccggactgattgcacaatatattcaaaaagaggcactggttgaacagctgcgcgaagccaatgctgcgctgattgcgcaatcgtataccgactcgttaaccgggctaccgaatcggcgggcgatttttgaaaatctgacgacactgttttccctcgcccggcatcttaaccataagataatgatcgcgtttatcgatctggataacttcaaattaatcaatgatcgttttggtcataatagtggcgatctgtttctcattcaggttggcgagcgccttaatacgctccagcaaaatggcgaagttattggtcgtctcggcggtgatgagtttttagttgtttcactaaacaacgagaatgcggatatttcgtcgctgcgagaacgcattcagcagcaaatacgtggagaatatcacttaggtgatgttgatttgtattatcccggtgccagtcttggcatagtagaagtcgatcctgaaacaaccgatgcagacagtgccctgcatgctgccgatattgcgatgtatcaggagaaaaaacacaaacagaaaacaccttttgtcgcgcatccagcgctacattcctgaggcgtattcacatccttttgattggtgataacatgcgaatcggtattatttttccggttgtaatcttcattacagcggtcgtatttttagcatggttttttattggcggctatgctgccccgggagcataaagatgaaaaaaacaacgattattatgatgggtgtggcgattattgtcgtactcggcactgagctgggatggtggtaacgtcacctctaaaaaatagcaaaggctgcctgtgtgcagcctttgtgcaatttaagcgttaacttttaatcttcctgtagataaatagcacgacaatcgcaccaataacggcaaccacgaagctgccaaaattgaagccatcgactttaccaaagccaaacagcgtgctgatccatccgccgactacggcaccgactatccccagcaggatagtcataaagaatccacctccatctttacctggcatgatccacttcgccagaataccggcaataagcccaaaaataatccatgacagaatgcccattgtttcctcacttatctgttttgcattagcgggttagtcgctgataaaaagcatagcacaacatcgggagggcaagatttgtgacgagcatcacggagtttttttttgcgatggcgcagaaattgcgccatcaacgatcagtgataattaccaaccacaaacatcatgttcgttttccgtgtcataagaacgtacggtattcaccagatcttttatcacttcagccgccacttctggcaccagcaaagtcatcggcgtctctgtttcataatcgacagaaacgccattgctgttattggtgacggtcacggtatacgttgctttgcccatgattcatttcccgttatgaatgactttccgttgttgcgcaccttccatcaggacttcaggagccacgaagaagtcaatgttgaaataagtatcgtcagtcatggcttcaatgttgtgccacttttctggagggaacaccgcaaactgccccgcttcgataaggatcacctgatcaggctctgcactgtgttcatcagcgtagccgagatatttgaccgccccatgcataacggaaaggcgtgggtaaaccccataagcgctaacttaagggttgtggtattacgcctgatatgatttaacgtgccgatgaattactctcacgataactggtcagcaattctggcccatattggtaagcccgaagaactggatacttcggcacgtaatgccggggctctaacccgccgccgcgaaattcgtgatgctgcaactctgctacgtctggggctggcttacggccccggggggatgtcattacgtgaagtcactgcatgggctcagctccatgacgttgcaacattatctgacgtggctctcctgaagcggctgcggaatgccgccgactggtttggcatacttgccgcacaaacacttgctgtacgcgccgcagttacgggttgtacaagcggaaagagattgcgtcttgtcgatggaacagcaatcagtgcgcccgggggcggcagcgctgaatggcgactacatatgggatatgatcctcatacctgtcagttcactgattttgagctaaccgacagcagagacgctgaacggctggaccgatttgcgcaaacggcagacgagatacgcattgctgaccggggattcggttcgcgtcccgaatgtatccgctcacttgcttttggagaagctgattatatcgtccgggttcactggcgaggattgcgctggttaactgcagaaggaatgcgctttgacatgatgggttttctgcgcgggctggattgcggtaagaacggtgaaaccactgtaatgataggcaattcaggtaataaaaaagccggagctccctttccggcacgtctcattgccgtatcacttcctcccgaaaaagcattaatcagtaaaacccgactgctcagcgagaatcgtcgaaaaggacgagtagttcaggcggaaacgctggaagcagcgggccatgtgctattgctaacatcattaccggaagatgaatattcagcagagcaagtggctgattgttaccgtctgcgatggcaaattgaactggcttttaagcggctcaaaagtttgctgcacctggatgctttgcgtgcaaaggaacctgaactcgcgaaagcgtggatatttgctaatctactcgccgcatttttaattgacgacataatccagccatcgctggatttcccccccagaagtgccggatccgaaaagaagaactaactcgttgtggagaataacaaaaatggtcatctggagcttacaggtggccattcgtgggacagtatccctgacagcctacaaaacgcaattgaagaacgcgaggcatcgtcttaacgaggcaccgaggcgtcgcattcttcagatggttcaacccttaagttagcgcttatggggtaaacccccgggcgcgttcctttatcaagatgacgttcgaatattccggcaggtgcagtttgtttattccagaaaggcgttgagcgcgtatgaatataattctgtgggatttgaagcatccttttccctccttcggtgaatgcgctgaaaacggtttattccagccgtttcagggtacgcctgataatttgcattttaaataccatttattggttactttttagcaccatatcagcgaagaatcagggaggattatagatgggaagcccgcgacaacgcgggctgaaagcatcaggattgcagcgtcgccagtcgggcagcgaaacccacgaacatcaaaccaatcagtgagttgccaactttagccagtttctttttggtacgtatgtactgcgtgacaaaagcaccagatataatcaggaagctcaaatagcagaaactcaccagttccagcgtcgccgccagaataaagaatgaaattcccgtatgtggggcattaacatcgataaactgtacgaaaaacgacacatagaacaaaatggctttcggattagtcaggctcaaaattaacgcgcgtttaaaaatagcaccgtattggggctcatcggatttggcctcgctatttttacccttcagggtcgcgtaaagaattttactccccagatagagcaaataaaacgcaccaagataacgtacaatgttgaataatatcggggtggtcttaattaatgtcgccactccagcccatgccagaaacatcaataccgcatcgccaataaatacaccgcaggccgcaagataaccgcctttcataccgctactgacgctatttttgagtacaaacagggtatttggccctggcaccaacacaataaaaatggccccaaccagataggtccagtaattcagaaccccgtattcagcgaacacattaacctctttaattatctttcgatcatgcgcgattaaaggtgaatatgctaaccaatctgtagcggcttagaaaggagaaaatcaggttttaacctgatatcaacccgataattgaatcattaatcaggcatgctccagtgaaaaattcgggtagtgctcggcaaaatactggcgtaaaaattctaccgttatccgcactttcgctgacgtcgccagccttgaaacataaacggcccagacgttcgctggctggtaatattccggtagcacttgcactaaatgaccactggcaatgttttcgctaacatcccaccaggaacgcagagcaatcccctgcccatcgagacaccactgatggacaatttctccatgattagacgacagtgggccggtgactttaatcgcatgggggccttctttattgcgtaattgccagacaccaaaaggatgatcgcgctctttaatgaccaggcacggcaatgcagaaagatcggttaaatgtttcggcgcgccatgttgcgcaataaattccggcgacgcgcagagaatacggtaattggtcgccagtttgcgggcgattaaattaggggcgatgtcatcgccaatgcgaatatcgagatcgacaccttcattgaccaaatcgaccagtcggtcttccacatcaaaacgtaattccagttgcggatacgccttcgccagcgctgataacgccggagccaccacctgtcgtccaaaaccaaagctgctgataatacgcagcatcccctgcggcacctgacgcacgtcagaaagttcgtccatcatctgaccgacatcctgcaaaatccgctgcgcccattcataaatccgctctccttcttcggtaatggtgacgcggcgggtggtgcggtgtaacaacaccacgtttagcgtttgctccagcaaggcgatgcgcttgctgacgaacgccggtgaaacgcccagttcttccgccacggcggcaaaaccagcccggcgagccaccagcataaagacgcgcaaatcattcagcagcggtaaattattcatgattcgtgttttatgtttcaccagttacggggattaattccttttcagtcaattataggatggtgatgttgtcaattttgatggtcaggaagtgagaacccaatgatgaaaacgatgcgtattgctgcgatcccgggagacgggattggcaaagaagtccttcctgaagggattcgcgtgttacaggctgccgctgagcgctggggcttcgccttgagttttgagcaaatggagtgggcgagctgcgagtattacagccatcacggtaaaatgatgccggacgactggcatgagcaacttagccgtttcgacgccatctattttggtgccgtcggctggccggataccgttccggaccatatttcgttgtggggttcgctgctgaaatttcgtcgtgaattcgaccagtacgtcaacctgcgcccggttcgtctctttcctggcgttccctgcccgctggcgggaaaacagcctggcgacatcgatttttacgtggtcagggaaaacaccgaaggcgaatattcctcgctcggcggtagagtgaatgaaggtacagagcatgaagtcgtcattcaggaatcggtatttacccgccgtggtgtcgatcgcattttgcgttatgccttcgaacttgcgcaaagccgtccacgtaagacactaacttctgccactaaatcgaacggtttagccatcagcatgccgtactgggatgagcgagtggaagcaatggccgagaattacccggagatccgctgggacaagcagcatattgatattctctgcgcgcgttttgtgatgcagccggaacgattcgatgtggtggtggcgtccaatttgtttggcgatatcctttccgatcttggcccggcctgcaccggcaccattggcattgccccatccgccaacctgaatccggaacgcactttcccgtcgctcttcgagcctgtccacggttccgcgccggatatctacgggaaaaatattgctaaccctatcgccacgatttgggccggggcaatgatgctcgattttctcggcaatggcgatgagcgtttccagcaagcgcataacggtattctggcagcaattgaagaagtgattgctcacgggccgaaaacacctgatatgaaaggcaatgccaccacgccacaggttgccgacgcgatttgcaaaattattttgcgttaaggtcaaaccagtttatttgaaccgcgtcactgacgcggtttttttattcgttctttgcagtaaataacctgcgtcatttcaccttttattgtttccgtttcgtgttttatggctttccgtattcttaattgtttaatttatgtaacatgcaaattttgttacgcgtacgttaggttccgccgtacaggtattggttttgctggcaatgggactggtgatttatttagccaccagtaaatacggcaatattcgtcttggcgaaggaaaaccggaatacagcacgctctcctggctgtttatgtttatttgtgccggtttaggttcttctacgctttattggggggttgctgaatgggcctattattatcaaacacctagattaaatatcgcaccgcgttcacaacaggcactcgaatttagcgttccctactctttcttccactggggcatcagcgcctgggcaacttatacgctggcctcattaatcatggcttatcactttcatgtgcggaaaaacaaaggtctgagcctttccggcattattgctgctattaccggcgttcgcccgcaaggcccatggggaaaactggtcgatttgatgttcctgatcgccactgtcggcgcactgaccatttcccttgttgttaccgcagcaacctttacccgtgggctttccgcgctgaccggtttacccgataacttcaccgtgcaggcatttgtgatcctgctttccggcggcattttttgcctaagctcgtggattggtatcaacaacggtttgcaacgtctgagcaaaatggttggctggggcgcgttcctgctgccattactggtgctgattgtcggcccaaccgaatttattaccaacagcatcatcaatgccatcggcctgaccacgcaaaacttcctgcaaatgagcttattcaccgatccgcttggcgatggttcatttacccgcaactggaccgttttctactggctgtggtggatctcatacacccctggcgtagcaatgtttgtcacccgcgtttcccgcggtcgtaagattaaagaagttatctggggactgatcctcggcagcaccgtcggttgctggttcttctttggcgtaatggaaagctatgccattcatcagtttatcaatggcgtaatcaacgtcccacaggtgctggaaacactgggcggcgaaacagctgtacagcaagttctgatgtcgttgccagccggtaaattgttcctcgccgcatacctgggcgtgatgattattttccttgcctcgcatatggatgcagtggcctacaccatggcggcgaccagtacgcgtaatctccaggaaggtgacgatcctgaccgtgggctgcgtcttttctggtgcgtggtgatcactctgatcccgctttccatcttgtttaccggtgcttcgctggaaacgatgaaaaccaccgtcgtgctcacagcccttcccttcctcgtcattttactggtgaaagtcggcgggtttattcgctggctgaaacaggattacgccgacattccggctcatcaagttgaacattatctcccgcagacaccggttgaagccctggaaaaaacgccagtgctccctgcgggaaccgtattcaaaggcgacaactgagcgccatcatcctaacgataaaggtatccctatgagcaatctgagccctgactttgtactacccgaaaatttttgcgctaacccgcaagaggcgtggaccattcctgcccgtttttataccgatcagaacgcgtttgaacacgaaaaagagaacgtcttcgccaaaagctggatttgcgtcgctcacagcagcgaactggcgaatgccaatgattatgtgacgcgtgagatcattggcgaaagcatcgtgctggtacgcggtcgtgataaggttttgcgcgcgttctataacgtgtgtccgcaccgtggtcatcagttgttgagcggtgaaggaaaagcaaaaaatgtgattacctgcccgtatcacgcatgggcattcaaactcgatggcaacctggcccatgcacgtaactgcgaaaacgtcgccaatttcgatagcgacaaagcgcaactggttccggtgcgtctggaagaatatgccggattcgtcttcatcaacatggaccccaacgccaccagcgtagaagatcaattacccggcctgggcgcgaaagtgctggaagcctgcccggaagtccacgatctgaaactggcggcccgctttaccacccgcacgcctgccaactggaagaacattgtcgataactatctcgagtgctatcactgtggtccggcgcatccaggtttctccgactccgtacaggttgatcgttactggcacaccatgcacggtaactggacgctgcaatacggtttcgccaaaccgtccgaacagtcgtttaaatttgaagagggtacggatgcggcattccacggtttctggctgtggccgtgcacgatgctgaacgtcaccccgatcaaagggatgatgacggtcatttatgaattcccggtggattctgaaactaccctgcaaaactacgatatttacttcaccaatgaagagttaaccgacgagcaaaaatcgctgattgagtggtatcgcgatgtgttccgtccggaagatttacgtctggttgaaagcgtacagaaagggctgaaatcgcgtggctatcgtggtcaggggcgcatcatggccgacagtagcggtagtggcatttccgaacatggtatcgcccatttccataatctgctggcgcaggtgtttaaggactaatgacatcggcggcggtattttccgccgctgggctgatttttgatggagtacagcaatgtcagactatcaaatgtttgaagtacaggtgagccaggttgaaccccttaccgaacaggtgaaacgcttcacgctggtggcaaccgatggcaaaccattacctgcgtttaccggaggaagtcacgtcattgtgcagatgagcgatggtgataaccagtacagcaatgcgtattcactactgagttcgccgcatgacacctcttgttatcagattgccgttcggctggaggaaaactcgcgcggcggttcccgctttttgcatcagcaggtaaaagtgggcgatcggttaacgatttcaacgcctaataacctgtttgcgctaattccctcagccagaaagcatctgtttatcgcgggcggtattggtatcacccctttcctgtcgcacatggcagagctgcaacacagcgacgtcgactggcagctacattactgctcgcgaaatccagaaagttgcgcatttcgtgatgagctagtccagcatccgcaggctgagaaagtccatttgcatcattcatcaaccggaacacgactggaattagcgcgattattggcggatatcgaacctggcacacacgtttatacctgtggccccgaggcgctaattgaagcggtaagaagtgaagctgcgcgtctggacatcgccgccgatacgctgcactttgagcaatttgctatcgaagacaaaaccggcgatgcatttaccctggtgcttgcccgttccggaaaagagtttgtggtgccggaagagatgactattttgcaggttattgaaaataataaagccgcgaaagtggaatgtttatgtcgtgaaggggtatgcggaacctgcgaaacagcaatactggaaggtgaagctgaccatcgggatcaatattttagcgatgaagagcgtgccagccagcaaagtatgttgatctgttgttcgcgtgcgaagggtaaacgcctggtgttggatttgtagtttgccgaagccggatgtggcgctgagcgcgcccagtccggcttcggaagattttactgcggatattcctgcaataaattgtgtaatgcttccgccatcagctcaccacgccagccggaaatcagctccggcaaattgttctgcggtttcagtttccagtgccagttcagcagttggttgatttgccgacgcgatgccagcaattcggcgctgatcttatgcgtttcgctcacgtcagtaatcagcgacttaatcgctttaaacgctttacgataacccggcatgtccatcaggttaagcatcggctgcggtaaggcatcttccggcaatgtctgcgctttttccaccagcgctagcagcgttttaccgtgaaagcggatttcgctaccggataaacccaggctgtccagttcgcctaaacttcccggcatataacgcgctaccgaccacaaatgctcttcacgcacgacaaagttcaccgccagatcgcgctctcgcgccttgcgcagtcgccagtcggctaacagttgcagacaggccagttggcgtgtgcgtaattgccaggcattggtgatatcacgccaggcatcttccggcgcaacgacttcctgacgacgcatttgcatcaggcggcattcatccagcgccgcaggtagccagccggaggcctccgtttctaccataagcttggcggtgatcggtaacagataccagacatccgccgctgcgtattcacactgacgttcggtcagcggtctggccagccagtcggtgcgcgattcactcttgtccagcgtaacgccggaatactcttccaccatggaagcgaaaccccatgacatcgggcgtccgcagaaggcagcaaggatttgcgtgtcaatcaagggttgtggtaattcgccaaagacattgaggaacacttccagatcttcactgcctgcatggagaaattttgtgatggacggatcgcgcaggatcgctttcagcggtgaccagtcggtgatcccgagtggatcgattagcgccagatgctcgccatcgaaaagttgaatcaaccccagctgcgggtaataagtgcgcgtacgaacaaattcagtatccagggctatcgccggaaaggcacggacggcttcacacaaagaagccagcgcatcgtccgtggtaatcatttggtaattcaaattgttttctctttagtgggcgtcaaaaaaaacgccggattaaccggcgtctgacgactgacttaacgctcaggctttattgtccactttgccgcgcgcttcgtcacgtaattctcgtcgcaaaatttttccgacgttagatttcggtaactcatcacgaaactccaccagcttcggtactttgtatcccgtgagctgacggcggcaaaaagtcaccagtgactcttcggtaagcgatggatcttttttcactacgaagattttcaccgcttcaccactggagccggaaggtacgccaacagccgcgacttcctgtacgccaggatgctgcatgacgacatcttcaatctcgttgggatagacgttaaaaccggaaaccagaatcatgtcttttttacgatcgacaatgcgcaggaatccttcttcatccattaccgcgatgtcgccggtgtgtaaccagccatttttgatgatttcatcggtagcatcgggacgctgccagtaacccagcatcacctgcggtcctttgacacaaagctcacccggttgacctggtggtacttcattatcatcatcatccaccagtttggcttccgtcgacggcaccggcaaaccgatgctaccactatgataatcaatatcatatgggttaacgctgaccagcggcgcacactcggtaaggccatagccttccagcagatactgtccggtcagtttcacccaacgctctgccaccacttgctgcactggcatcccaccgcctgcggaaagatgcagactggagaaatccagctgctggaactctttattgttcagcaacgcattgaacaaggtgttaacgcccgtgatagcggtaaacggatatttcgctaactcttttaccaaccctggaatatcgcgcgggttagtgataagcaggttctgcccacccagttcgataaacagcaggcagttaatggtcagggcaaaaatgtgatacagcggcagcgccgtcaccaccagctctttgcccggatgcaacagcggaccataggtcgcgttaacctgttccaggttcgccagcatattgcggtgagtcagcatcgcgcctttcgccacaccagtggtgccgccggtgtattgcagaaaagctaaatcttccggcaccagttcgggtttgacgtactgcatccggtagccgttatgcagtgcgctacgaaatgaaatggcatctggcagatggtatttcggcaccaaacgcttgatgtatttaacaacgaaattgactaccgtgccttttgccgtagatagctgatcgcccatacgggtcagaattacgtgctgaacggcggttttatcaaccactttttccagtgtgtgagcaaagttagacacgataacaatcgccgatgcgccgctatcgttaagctgatgctcaagctcacgcggggtatacaacgggttaacgtttacgacgatcatcccggcacgcaaaatgccaaacagcgccaccggatattgcaataaattaggcatcatcaacgcaacgcgatcgcctttcttcagccccaacccttgttgcaaataagcggcaaacgcgcgactgcgttcttccagcttgcggaaggtcattacctcccccatattcacaaacgcaggttgatcggcgtagcgcgcgaccgactgctcaaacatatctaccagagattgataacggtcagggttgatctccgtcggaacgtccgcgggataacggttaagccaaaccttcttcaattcttcacctctaaaatgcgtgttcgtcgtcatcgcaaccccaaatgatatacatgccgttaacataatattaactcatcataccagcttgataattacccaacgaaaaggttgcgaagcgcgtcactatttatttttatctttaccgtaagaatgcagaaacagcggaccagccgctgtttctttttctttaaaaacaagcaattattcagttacaactgtttgtactctcgcggggccgggattataccagccccatccgccgtagccatagggccagccacgaccgccataaaaccatggatcaatcggctgaggcggcataatcacctgctgggttaaatgccaacgtttgtaacccgttacttgcatcaccataaatttatagggcgtattgccgattttgccgtcaaccgcaccagtgattggcccgactaccgtaaccagttgtccacggaaatccaccgggtccagaaaaccgttcacatcggcataaatgcgaccgcgagaaagttctcccagcgtcggtctggctccgctgtccagcggtacggtagcaatttccaggcgagttttcccttgctggttttgtaccgcaaccactttgccaccaaagcgtgcctcctgaccaacgtacagctgcggcgcactcatcacccgaactaaatcttgttgcggcgtgggactgctgcctttaatggcgtccggcacagtgacacaaccgctcagcattagcgcaaacgtacctgccagtatgcctttgataacattcttttgaaccgccatggtgcgactcctttttttctcagggcatactcttaagattcattctttgcccggaagtttcttccatgcgacgttgttacgtaaataaaccggttcggcatgttccaccgccaccgttttaccctcagcaaacatctgacacgcaatcggcagcatatcttcagcagcaggcagtaacacttcgccatcgcgcaaaaccagcccgctctctttaccgagatccggccaagcttgccagcccgtccctaccgtcacccattcgccggaaagctgttgcattcgttcatggacgatttcgggtttgagtacggcttcggtttcttcaccgtgccagataccgttttcatcacgctgatattcggcccagtaaacttcgcccattcgcgcgtcaatggctgccagcacgcgggttgcgccgtttttgcgccacgccccttgcgccatcgtcattagcgtggagacgccaatcatcggtaattccgcgccaagcgccagcccttgcgcgatgccaataccaatgcgcacgccagtaaagctaccggggccgcgcccgtaagccagagcgttaatatcagtcagggaagttccgctggtggtcaggatatcctgcaccatcggtaagattcgttgagtatgttcacgagggcaaagctcaaaatgagcgttgacagtaccgtcgttccacagggcgacagagcaggcctctgtcgcggtatcgatagccagaattcgcatgggtcttcgtgcttagatcaataaaaaggcgcgcatcataccatactccgtaacaaattacctggaggatggtatcgcaaggaaacgaaccgcacgggcaatgtcacgggtgcgtggcgcgggcggcagactggcgagaaacgtcgcgccgtaaggacgcatcaccagccgattgtcacaaatcaccagcacgccacgatcgtcggcgtcgcgaatcagtcgccctaccccctgtttgagagtaatgacggcatctggtagttgcacttcatcgaacgggtcgccaccgcgcaaacgacaatcttccatgcgcgcttttaacagtggatcatccggcgaggtaaacggcaatttgtcgataattaccaatgacaatgtatcgccacgcacgtccaccccttcccagaaactgctggttgccacaagaagcgcattaccggcgctgacaaattgctgcaacagttgccctttgctggtttccccctgcaacaatacaggaagcgtcatggtagcgcggaactgctcggccagatcgcgcatcatggcgtgcgaggtacaaagcataaaacaacgaccgttgttagcttcgatgatcggtcgcagcattgccgctaactggcgagcagaacctggctggttggtttgcggcagattgcgcggcacacagagtaacgcctggcggctgtaatcaaatgggctgggcaacagcaacgactcggcctgttcgatgccaagccgcgaggtgaaatgatgcagatcgtcgttcaccgacagcgttgctgaggtgaagatccagctaccgggtttttgcgccattaactctttgaatttatccgccacgctgagcggcgtgagagccagagtaaaatggcgcgaagtgcattcgtaccagtagctgtagcccggctgattgatctcttttagccgcttcagccgtgtgcgatacaacgtggcgcgctcaaatgccgcatccagcaaggcggaacgccccagtgacagtttcgccacgtcataacaaagttccagggtgtcatcgagcagtaaaaatgcccgctgaatttgcggattagctaacagctcacgcaggttaccgcgataacctggctcaccgagttgcagacgaaaatcctgcgcactctgggcaagacgatcagcgcacttttgtaactgctgggtgtcttttaattcggtgcggtaggcgatggtgatgtcttttgccaggtcgagcagttgtcgactggagagtgactgaccaaaatactggctggcaatgtccggtagctggtgggcttcgtcgaagatcatgacgtccgcttccgggatcagttcgccaaatccactctctttaaccaccatatccgccagaaagagatgatggtttaccaccaccacatcggcgtccatcgcttttttacgtgctttgaccacaaagcaatctttatacatcgggcagtcgctgccaagacagttgtcgttggtgctggtgaccagcggccacgcctgtgaatcttccgccacgctgacgcaggtgctgatatcaccatcgactgtttgattagaccaggagcgcagcaggatcacatcgcttaagatttgtaccggcagatcgccccccgccagcgcctgctgttcgagacgttcgaggcagaggtagtttgagcgccctttcagcagcgccacgttgcccgtatatttcaatgcctttgagactgttggcaaatcgcggctgtagagctgatcctgcaacgcttttgagccggtcgagataatgactttctttttcgcccgcagcgcaggagccaggtaagcgtaggttttgcccgtaccggttcctgcttccaccaccagcggctggcctttttctatcgcctgggtgacggctaccgccatctgtcgctgtggttctcgcggcttaaagcctggtatcgctttcgccagctgaccgtctggtgcaaaatcgtccgtcacactaccccctgttgatttgaacagggattatgtcaggatgagggcgctttcgccagttgaagtggtgacggcgacctcacattgtggcagtctttgcagcacgaaaatggaagtataatgaggacaaaatgatgactatcgttcgtatcgatgctgaagcccgctggtctgatgtagtaatccacaacaacacgctctactacactggtgtaccggaaaacctcgacgccgatgcctttgagcaaaccgccaacacgctggcacagattgacgccgtgctggaaaaacagggcagcaataaatcgagcattctggatgccaccattttcctggccgataaaaacgacttcgcggcgatgaataaagcgtgggatgcctgggttgtcgcgggtcatgcgccggtgcgctgcacggtacaagcgggtttgatgaacccgaagtataaagttgaaattaagattgtggctgcggtgtaagctttatcgaagcaaaataagtcagacgataatttatcgataatactggtcggttttacataaatcgaccagagaataagatattactgttgatgcttctgctaattcattatttatatttataatttcaattttatctataaaactaactatataaataaacataaacatgccgttgtgttcgccctttgattagcaactctggttttctttcttagctgaacaatctggttatagcgtgcggactgaccgttaaatttctccatcttactggataacacaccatgagctgctacctttaaaacacctgaatgtcaacaggttaactcgtgccatatcgttataatccctttgatattagatgcaaattaaggtcatatatagccttatcgataacatggttaattttaaggataagaatatgcctgctgtaatagataaagccctggatttcattggtgccatggatgtatcagcgccaacaccaagttcgatgaatgaaagcacggcgaagggaatctttaaatatttaaaagaactgggagtacccgcgagtgccgctgatattacggcgcgagctgaccaggaaggctggaaccctgggttcacggaaaaaatggttggatgggcaaaaaaaatggagacaggtgaacgttctgtgattaaaaatcctgaatacttttcaacatatatgcaggaagaactaaaagcactggtctgagttaaatttatatcagcataaatgggtcaggacgcttttaatcacatataaaaagcgtcctttttctcacaatcaaatgatcatcggcttctataacgaaatcgatacggattagtgtgttactcgtcttcatcctcaaaacgcgccacgattcgctcgccggagtggttggcacgcagctcttctgccaccagcgcgattgcctggccgctgctcatcccttgtgccatcagttcctggatccgctcgacagctttttgctgctgttcatgggtgagtgaaggtaaacctgcaaacattgttaactcctgctaaattgttggcgctaattatttcatgctacccggcacatagccagtagagtcaggactgatgaagacgttatctcccgctgtgattactttaccctggcgtcaggacgccgctgaattttatttctcccgcttaagccacctgccgtgggcgatgcttttacactccggctatgccgatcatccgtatagccgctttgatattgtggtcgccgagccgatttgcactttaaccactttcggtaaagaaaccgttgttagtgaaagcgaaaaacgcacaacgaccactgatgacccgctacaggtgctccagcaggtgctggatcgcgcagacattcgcccaacgcataacgaagatttgccatttcagggcggcgcactggggttgtttggctacgatctgggccgccgttttgagtcactgccagaaattgcggaacaagatatcgttctgccggatatggcagtgggtatctacgattgggcgctcattgtcgaccaccagcgtcatacagtttctttgctgagtcataatgatgtcaatgcccgtcgggcctggctggaaagccagcaattctcgccgcaggaagatttcacgctcacttccgactggcaatccaatatgacccgcgagcagtacggcgaaaaatttcgccaggtacaggaatatctgcacagcggtgattgctatcaggtgaatctcgcccaacgttttcatgcgacctattctggcgatgaatggcaggcattccttcagcttaatcaggccaaccgcgcgccatttagcgcttttttacgtcttgaacagggtgcaattttaagcctttcgccagagcggtttattctttgtgataatagtgaaatccagacccgcccgattaaaggcacgctaccacgcctgcccgatcctcaggaagatagcaaacaagcagtaaaactggcgaactcagcgaaagatcgtgccgaaaatctgatgattgtcgatttaatgcgtaatgatatcggtcgtgttgccgtagcaggttcggtaaaagtaccagagctgttcgtggtggaacccttccctgccgtgcatcatctggtcagcaccataacggcgcaactaccagaacagttacacgccagcgatctgctgcgcgcagcttttcctggtggctcaataaccggggctccgaaagtacgggctatggaaattatcgacgaactggaaccgcagcgacgcaatgcctggtgcggcagcattggctatttgagcttttgcggcaacatggataccagtattactatccgcacgctgactgccattaacggacaaattttctgctctgcgggcggtggaattgtcgccgatagccaggaagaagcggaatatcaggaaacttttgataaagttaatcgtatcctgaagcaactggagaagtaagacgtggaataccgtagcctgacgcttgatgattttttatcgcgctttcaacttttgcgcccgcaaattaaccgggaaaccctaaatcatcgtcaggctgctgtgttaatccccatcgtccgtcgaccgcaaccggggttgttgctgactcagcgttcgattcatctgcgtaaacacgctggacaagtggcattccctggaggtgcagtcgatgacacggacgcatcagctatcgccgccgcgctgcgcgaagctgaagaagaggtcgctataccgccttccgccgttgaagttatcggcgtgctgccgcccgtcgatagcgtcactggctaccaggtaaccccagtggtcggcattatcccgcccgatctgccgtatcgcgccagtgaagatgaagtctcggcggtgtttgaaatgccgctcgcccaggcattacatctgggtcgttatcaccctttagatatctaccgccgtggtgattcacatcgggtatggctgtcctggtacgaacagtattttgtatggggaatgaccgcaggcataattcgtgagctggcgctgcaaattggtgtgaaaccctgactatacttatctttacatctacaaaacactacttgagacaatcatcgcaatattagttaaatcgcggtttttgattagtttaattcatgtgaatagttaagccagtcgccgcgttccctcttacactatgcgctgttattagttcgttactggaagtccagtcaccttgtcaggagtattatcgtgattagtctattcgacatgtttaaggtggggattggtccctcatcttcccataccgtagggcctatgaaggcaggtaaacagttcgtcgatgatctggtcgaaaaaggcttactggatagcgttactcgcgttgccgtggacgtttatggttcactgtcgctgacgggtaaaggccaccacaccgatatcgccattattatgggtcttgcaggtaacgaacctgccaccgtggatatcgacagtattcccggttttattcgcgacgtagaagagcgcgaacgtctgctgctggcacagggacggcatgaagtggatttcccgcgcgacaacgggatgcgttttcataacggcaacctgccgctgcatgaaaacggtatgcaaatccacgcctataacggcgatgaagtcgtctacagcaaaacttattattccatcggcggcggttttatcgtcgatgaagaacactttggtcaggatgctgccaacgaagtaagcgtgccgtatccgttcaaatctgccaccgaactgctcgcgtactgtaatgaaaccggctattcgctgtctggtctcgctatgcagaacgaactggcgctgcacagcaagaaagagatcgacgagtatttcgcgcatgtctggcaaaccatgcaggcatgtatcgatcgcgggatgaacaccgaaggtgtactgccaggcccgctgcgcgtgccacgtcgtgcgtctgccctgcgccggatgctggtttccagcgataaactgtctaacgatccgatgaatgtcattgactgggtaaacatgtttgcgctggcagttaacgaagaaaacgccgccggtggtcgtgtggtaactgcgccaaccaacggtgcctgcggtatcgttccggcagtgctggcttactatgaccactttattgaatcggtcagcccggacatctatacccgttactttatggcagcgggcgcgattggtgcattgtataaaatgaacgcctctatttccggtgcggaagttggttgccagggcgaagtgggtgttgcctgttcaatggctgctgcgggtcttgcagaactgctgggcggtagcccggaacaggtttgcgtggcggcggaaattggcatggaacacaaccttggtttaacctgcgacccggttgcagggcaggttcaggtgccgtgcattgagcgtaatgccattgcctctgtgaaggcgattaacgccgcgcggatggctctgcgccgcaccagtgcaccgcgcgtctcgctggataaggtcatcgaaacgatgtacgaaaccggtaaggacatgaacgccaaataccgcgaaacctcacgcggtggtctggcaatcaaagtccagtgtgactaatacttcttactcgcccatctgcaacggatgggcgaatttatacccgctttctcgtctgctgtaatattccccactacacttccactgttgcgtcaggcgtttgtcgccatacgcttacagggtggcccgcatgcaaaaagcacaacggatcattaaaacctatcgtcgtaatcgaatgattgtttgtacgatttgcgcactcgttacgctcgcttcgaccctgagcgtgcgatttatttcacagcgtaacttaaatcaacaacgggtagtacaattcgccaatcacgctgtagaggaattagataaagtactgcttcccctacaggcaggtagcgaagtcttgcttccgctgattggtctgccctgctctgtcgcccatttgccattacgtaaacaggcggcaaaactccaaactgtgcgatccattggcctggtgcaagacggcacactttattgctccagcatttttggttatcgcaatgtgcccgtcgtggacattctggctgaacttcctgcaccgcaaccacttttacgcctgacgatcgaccgtgccctgattaaaggcagtccggttttgattcaatggacgcctgcagcgggcagtagcaatgctggggtcatggagatgattaacatcgacttactgacggcaatgctgcttgagccacaactgccgcaaatcagtagcgccagcctgacggtggacaaacggcatttgctctatggtaatgggctggtagattcccttccgcaacctgaagacaatgaaaactatcaggtttcttcgcaacgctttcctttaaccattaacgttaatggtccgggggctacggcgctggcatggcactatcttccaacacaattaccgctggcggtgctgctaagtttactggtgggctacatcgcctggctggcgaccgcttaccgaatgagcttttcccgcgaaatcaatctgggcctggcgcaacatgagttcgaattgttctgtcagcctttgcttaatgcgcgcagccagcaatgtattggtgtagagattttgctgcgctggaacaatccgcgtcagggctggatttcaccggatgtgtttattcctatcgcggaagaacatcatttaattgtgccactgacccgctatgtgatggcagaaaccattcgtcagcgccatgttttcccgatgagtagtcagtttcatgttggcattaacgtcgcacccagccattttcgccgtggtgtgctgataaaagatctcaatcagtactggtttagcgctcacccgattcagcaactgatcctcgaaatcaccgaacgcgatgccttactggatgttgattatcggattgcccgcgagctgcatcgtaaaaacgtcaaactggcgattgatgacttcggcaccggcaacagctcgttttcctggcttgaaacattacgtcctgacgtgctgaaaattgataagtcatttaccgcagctataggttctgacgcggttaactcgacggtgaccgatatcatcatcgcgctggggcaaagactgaatattgaactggtggcggagggcgtggaaacgcaagaacaggcgaagtatttgcgccgtcatggcgtgcatattttgcaagggtatttgtacgcacagccgatgccgctacgtgattttcccaaatggctggcgggcagccaaccgccgcccgcccggcataatggacatatcacgcccattatgccgttacgttaacgcttactcatcttcatcgtgcgccggttgctctttaacaatgcgaaccagatcaacacgataatcattggcttcaatgatggtgatatgcagtggccctacatcaatcacatcgcccacacggggaatgtgaccatttgccgagatcacgaggcccgcgaccgtcgcgatatcatcgtcatcggcaaggtgctcaacatcaagcgcctgctgcaaggcatgcaaatctgtaccgccttttaccagccagccgtcaccatcagtaatgatttccggcgtttcgtcagcgtccgggaattcacccgcaatggcttccagcacatccagcggcgtgaccagaccttgtaccacaccaaactcgttggtcacgataacaaagctcccgcgagcacgacgcagcacgcccaacaggttgatcggatcgagggtttccgggacgataatcgccggagacgccgaagcaatcgccgccacatcaacgccctcttccagcgccaccagcagttctttagcacgtacaataccgatgatttcatccagttcaccgcgacataccgggaacagactgtgcggtgaagagagcagttgctcgcggatttcatcgaccccgagattagcgtcaacccagcttatttcaccgcgcggcgtcatgatcccgcgcagagaacgcgacgccagcgtcagtacgccgttaatcatgtaacgttcttcttcggcaaatgcaccttccgggatcggcatcggcatcgggttatcggcatcgtgctgaacattggcctgacgtttcccgcccatcaaacgcaggatggcatcggcagtacgcgctcgcagcggcaaagtcgactggtggcgaataaagttgcgacgcgcaatctggttaaacacttcgatgatgatcgagaagccaatcgcggcatacaggtaacctttcggaatgtggaaaccgaaaccttctgccaccagactcagaccaatcattaacaggaagctcagacagagcaccaccaccgtggggtgctggttaacgaatcgcgtcagcggtttggatgccagcaacataaccgccatcgcaatcactaccgccgccatcatcaccggcagatggttaaccatccctactgcagtaattaccgcatccaacgagaagacggcgtcaaggatgacaatctgtgtgacgaccacccagaaactggcgtagcctttaccgtggccggaatcatgatcgcggttttccagccgttcatgcagttcggttgttgctttgaacagcaagaatatccccccgaacaacataatcaggtcgcgtccggagaaggagaaatccatgacggtaaatagcggtttggtcagcgtgaccatccatgaaatcagcgacagcagccccagacgcataatcagcgccagtgataaccccagcaaacgcgctttatcgcgttgttttggcggcagtttgtcagcaagaatggcgatgaagaccaggttatcgatacccagcacaatttcgagaacaacaagcgtgagtagccccgcccaaattgaggggtccattaagaattccatgacaagctcctgcttaaggaatagctattcgacgccagaaataatgcaggcgtaacgacaaaatgcaaacgaaaggtgcggcatagagtgccagaaaggcaggcgttaaaaggcctgatgctgaaatgacgtcggtgacgatccatactgcgggctactgccctatactccatggttgttaaacgggagttaaacatatcagagacgcctctgatttggcaaagatttaccttcctttgcaaacgaatgtgacaaggatattttacctttcgaaatttctgctaatcgaaagttaaattacggatcttcatcacataaaataattttttcgatatctaaaataaatcgcgaaacgcaggggtttttggttgtagcccttatctgaatcgattcgattgtggacgacgattcaaaaatacatctggcacgttgaggtgttaacgataataaaggaggtagcaagtgaccattgctattgttataggcacacatggttgggctgcagagcagttgcttaaaacggcagaaatgctgttaggcgagcaggaaaacgtcggctggatcgatttcgttccaggtgaaaatgccgaaacgctgattgaaaagtacaacgctcagttggcaaaactcgacaccactaaaggcgtgctgtttctcgttgatacatggggaggcagcccgttcaatgctgccagccgcattgtcgtcgacaaagagcattatgaagtcattgcaggcgttaacattccaatgctcgtggaaacgttaatggcccgtgatgatgacccaagctttgatgaactggtggcactggcagtagaaacaggccgtgaaggcgtgaaagcactgaaagccaaaccggttgaaaaagccgcgccagcacccgctgccgcagcaccaaaagcggctccaactccggcaaaaccaatggggccaaacgactacatggttattggccttgcgcgtatcgacgaccgtctgattcacggtcaggtcgccacccgctggaccaaagaaaccaatgtctcccgtattattgttgttagtgatgaagtggctgcggataccgttcgtaagacactgctcacccaggttgcacctccgggcgtaacagcacacgtagttgatgttgccaaaatgattcgcgtctacaacaacccgaaatatgctggcgaacgcgtaatgctgttatttaccaacccaacagatgtagagcgtctcgttgaaggcggcgtgaaaatcacctctgttaacgtcggtggtatggcattccgtcagggtaaaacccaggtgaataacgcggtttcggttgatgaaaaagatatcgaggcgttcaagaaactgaatgcgcgcggtattgagctggaagtccgtaaggtttccaccgatccgaaactgaaaatgatggatctgatcagcaaaatcgataagtaacgtattgtgttgattatcactcagttttcacacttaagtcttacgtaaacaggagaagtacaatggagattaccactcttcaaattgtgctggtatttctcgtagcctgtatcgcaggtatgggatcaatcctcgatgaatttcagtttcaccgtccgctaatcgcgtgtaccctggtgggtatcgttcttggggatatgaaaaccggtattattatcggtggtacgctggaaatgatcgcgctgggctggatgaacatcggtgctgcagttgcgcctgacgccgctctggcttctatcatttctaccattctggttatcgcaggtcatcagagcattggtgcaggtatcgcactggcaatccctctggccgctgcgggccaggtactgaccatcatcgttcgtactattaccgttgctttccagcacgctgcggataaggctgctgataacggcaacctgacagcgatttcctggatccacgtttcttctctgttcctgcaagcaatgcgtgtggctattccggccgtcatcgttgcgctgtctgttggtaccagcgaagtacagaacatgctgaatgcgattccggaagtggtgaccaatggtctgaatatcgccggtggcatgatcgtggtggttggttatgcgatggttatcaacatgatgcgtgctggctacctgatgccgttcttctacctcggcttcgtaaccgcagcattcaccaactttaacctggttgctctgggtgtgattggtactgttatggcagtgctctacatccaacttagcccgaaatacaaccgcgtagccggtgcgcctgctcaggcagctggtaacaacgatctcgataacgaactggactaacaggtgagcgaaatggttgatacaactcaaactaccaccgagaaaaaactcactcaaagtgatattcgtggcgtcttcctgcgttctaacctcttccagggttcatggaacttcgaacgtatgcaggcactgggtttctgcttctctatggtaccggcaattcgtcgcctctaccctgagaacaacgaagctcgtaaacaagctattcgccgtcacctggagttctttaacacccagccgttcgtggctgcgccgattctcggcgtaaccctggcgctggaagaacagcgtgctaatggcgcagagatcgacgacggtgctatcaacggtatcaaagtcggtttgatggggccactggctggtgtaggcgacccgatcttctggggaaccgtacgtccggtatttgcagcactgggtgccggtatcgcgatgagcggcagcctgttaggtccgctgctgttcttcatcctgtttaacctggtgcgtctggcaacccgttactacggcgtagcgtatggttactccaaaggtatcgatatcgttaaagatatgggtggtggcttcctgcaaaaactgacggaaggggcgtctatcctcggcctgtttgtcatgggggcattggttaacaagtggacacatgtcaacatcccgctggttgtctctcgcattactgaccagacgggcaaagaacacgttactactgtccagactattctggaccagttaatgccaggcctggtaccactgctgctgacctttgcttgtatgtggctactgcgcaaaaaagttaacccgctgtggatcatcgttggcttcttcgtcatcggtatcgctggttacgcttgcggcctgctgggactgtaagactgttgtacactaccggggccttttggccccgtttttttatctggaggattaatgacaatcacggacctggtactgattcttttcatcgccgcactcctggccttcgcgatctacgatcagttcatcatgccccgccgtaacggccccaccctgctggcaattcctttgctccggcgtggtcgcatcgatagcgttatcttcgtcggattgattgtcattcttatctataacaacgtcacgaatcatggtgcgttaataacgacatggttattaagcgcactggctctgatgggtttttatatattctggatccgcgttccgaagatcatctttaaacaaaaaggttttttcttcgccaatgtctggattgaatatagccgaatcaaagcgatgaacttgtcggaagatggcgtgttggtgatgcaattagaacagcgtcggctgttaatccgcgttcgaaatatcgacgatctggaaaaaatttataagcttctcgtttcaactcaataagttatgaatttagccaaagctatgtttagtgtatttttaataatcagacatagcttaggctatattacctcttcccttatttgttatttattttaacgtttcattgatatataaatccaaatgaaaatcgttatcaataaagcaatgaaataatatattccaacagttgttttatattctcaaaatatgttaaggttgcgccctcatttggggagtagccgatttccagattccggaaatgtacgtgtcaacatactcgttgcaaaacgtggcacgtacggactgaatactttcagtcaggcgagaccatatgcacatcaatcgctatgcctgcatgaacgcgaaaaccatcacggcttgttgttcatgtatgcatgtttgctgggggcgatgatgtgttttatggataccccggtcaggacattgtcatgaatatcactgctactgttcttcttgcgtttggtatgtcgatggatgcatttgctgcatcaatcggtaaaggtgccaccctccataaaccgaaattttctgaagcattgcgaaccggccttatttttggtgccgtcgaaaccctgacgccgctgatcggctggggaatgggcatgttagccagccggtttgtccttgaatggaaccactggattgcgtttgtgctgctgatattcctcggcgggcgaatgattattgagggttttcgtggcgcagatgatgaagatgaagagccgcgccgtcgacacggtttctggctactggtaaccaccgcgattgccaccagcctggatgccatggctgtgggtgttggtcttgctttcctgcaggtcaacattatcgcgaccgcattggccattggttgtgcaaccttgattatgtcaacattagggatgatggttggtcgctttatcggctcaattattgggaaaaaagcggaaattctcggcgggctggtgctgatcggcatcggcgtccagatcctctggacgcacttccacggttaataagaacgctgccagaggtgaatattaaagtccgtctggcagtcgaacacttcttttgctgccagtgtttgccagacttctggcttcgcacgccaggcaaacggcgtcatctgcaataatgcgacggcttcatcaccgcgaagacgcatcggataacacaactccgcactctgctgtaatgtaaaaccttccagttgttctgcatgaggtgcatgaagatgtacttcattgtaaatcagccccttcagctccatcaaatgtcgcggtcccggcgtggcagtaatgacccagccgccgggcttcactactcgtgctaattcttctgctttacacggcgcgtaaatacgtattatggcgtccatactggtatcggaaaacggcaaacggtggctggaagcgacacaaaaagtgacctgcggatagcgtttcgccgccgcttttatcgctaccttcgaaacatccagaccaaacgtggtgatttcgggcaacgcatcggcaaatgcgtgtgtgtaatacccttcaccacagccaatatccagcaccgccgtggccttatcatcaagccgttccctcagttgggcgacaattgcatcacgcagcggctgataatgtccggcatctaagaatgcgcggcgtgcttgcatcatttccgcgctgtcgcccggatcacgagaccgtttatgctgaacgggcagcagattgacatacccttctttcgccatatcaaactgatgtcgctggggacagatatagctgtttttttcacgcgaaagaggctgatggcaaagtggacaggaaaaagacatgacaactccggcaggatactaaaggccgcaagtgtaacgcgaatcacgcggcgggcaaatatccgaacgccaggagcgaagataaagcatagtaaaaagcctcgcattcgacgaggctttatagcgagattgaagcgtattcacacttcagatcagtggattcgatcagatagctgttacgttaacagctgccggacctttctggccgtcctgaatttcgaactcaacgttctgaccttcagccagagttttgaagccattaccctggatagcggagaagtgtacgaacacatctttgctgccatcagccggagtaatgaagccaaaacctttagactcgttgaaccacttaacctgacctttaatctttgccatttgaaaaattccttagattgttttcttcgcccgcaggcataacatagataaaactgacacattactgcatgaggcaccaatataaggctcggcagagaagcggtattcaacgtcaacgtgtttactcaggacttctttactgaaaatgccacacataaacagaactgtacctcgtttaacccgaaatctgttatcacatacaacgttaattatggcaagccatttttaaacatgtctcgatcagacgcacaaatctcgatacgtcttccactttttttgcacacttatgcaacggaatacgcgccgatatatcattgtgcttaaccttgccagttcaggcagatacttaaactggcgtattttctaacatagttcaataagttcagttgttccaggccagtgggagaagttattacatagtgcgtgcaatatcacattttttgctatgcaatgaataaaaagttatatcactttttctcataaaacagtcagttaacggctattaattaccctaaagagaagtcaatccccaaagggattgtaaatttaaaataagaaaaattgatgaatgagcaaaaaaatcaagagagaaacgtttcgctaataaataataccacgcttaatcacaaatccgatgtaaacatcctaataaattaatggggtaaatatctttttctgatatcccgttacgcaaataaataatatgataattatttgaagtcagaccagagttttaatttgaagcagttgcaccatgacagtgcgtataatcaggatgaattgagtaacccttcaacgacggggttactcaagattgaggaaggattatcgttcggcgaccagacgaataatatcttcgtcttcaaccgatttttgactctcaacggtctttttatctgctttctctggttcgtttgcttcgcacaaacgacgtaacagtgcattttgacgtttttgctgatccagcaacgcctcaagcagttcaatctgttcgttagtccgtgaactggcacgattgataaaaaaccacaagatgagcccgataagaagaaccaccaccgatacaaccaaagacgcaatgttcatcacgcctgaatttacaacttcgttcatttcaccacctctgagtagaggcgctattctaccactgctggagaggaagaaaatctagtgctgaaaaaatgatatcaccacgggataaactggttaatggcacaaattccgctgaaaaattgtacatcctgatcgcacatcatgttgaatacctgcgcccaaagcagcaagcaagccaacaccacgacaaccagaacgacccatcgaaactttttcactccaatctccgtttcacctaccttatgtcattaaactagcatgcgttagttaaacagcgcctaactatgtcgatattcgtgctttttcggaatgagtcgcttgcttcagcgcatattgccgctacgattaagcgaacataaaaagagaagaggttgtaatgcgattcatcattcgcacagttatgctgatagcactggtatggataggattattactcagcggatatggcgttttgattggaagcaaagagaatgccgcaggattaggtttgcaatgtacctatctgactgccagaggcaccagcacggtacaatacttgcacactaaaagtggttttttggggataacagattgcccgctgttacgcaaaagcaatatcgtggtcgataatggttaagggcaataaataaccagattctcactcctgagtaaaatactcttatagcaagcgcgtttaatataacgccaccttcaactttatttttctcatgctaaataaagaacctgtctgtttgatattccgacaggttcttactctcatcagaacggatagtcgtgataacccatttgggcagaaattttgcgcgctgcggtatgcaacattgcgacatattcctgtaaacgctcttcagagaaacgcaacgtcgggaaggagatgctcaaaccggcaatgaccacgccaaagcgatcaaataccggtaccgcaatgcatcgcagcccttcttcctgctcttcattatcttcgccatacccctgctcgcgcacctggtccagaacgggtaataacgcttctgtactggtgatggtccgctcggtactgcgtttatactccacgccctcaagaatttgcttcacttcatcgcgatcgcgccatgccagcagtaccttaccaatcgcggtgctgtacagcggattacgacgcccaatccgtgaatacatgcgcaaattgtacatagagtcaattttgtgaatgtaaacaatactgtcttcgtccagtgcgccgaggtggatagtttctttggtcaggcgggagagctcacgcatctggatatctgcgctacgaattaaatcgacgttttgtaacgcgcgagcgcccagttcaaacaatttcagggtcagggaatatttctccgactccccttcctgcgccacataacctaaggttttcatggtctgtaaaaagcgataaacggtgctttttgacatcatgacgcgctgcgacagctcggttatccctatttcgcgctcttcacccagcgcctgcaaaatgccaaaaacttttagcacggaagatacagaatcaggctgtttatccagatctgcgttagccatttatcacctcattgcgagtgttttataaaaatcagaactgttttttattataatttcgcaccagggtggtcgcaatccatcttttgccggttagttacaattctgcgacatccaccgtgaatatcagtgctagaatcatacccctgttgattattcaccaaagatataaaattcctatgccaaaagttcaggccgacggcctgccattgccccagcgatacggtgcgatattaaccattgtgattggtatttcgatggccgtccttgacggcgcaatcgccaacgtcgccctgccaacaatcgccacggaccttcatgccacgccagccagttccatctgggtagtgaacgcctatcaaatcgccattgtcatctccctgctctcgttttcgtttctgggcgatatgtttggctatcgacgtatttataaatgcggtctggtcgtttttctgttgtcttcactgttctgcgccctttctgattcgctgcaaatgctcacccttgcgcgtgtcatacaaggtttcggcggtgcagcgttgatgagcgttaataccgcacttatccgcctgatctatccacaacgttttctgggtagagggatgggcataaactcgtttattgttgccgtctcttctgctgccgggccgacaattgctgcagcaatcctctccatcgcatcctggaaatggttatttttaatcaacgtaccgttaggtattatcgccctgcttctggcgatgcgttttctgccacccaatggttctcgcgccagtaaaccccgtttcgacctgcccagcgccgtgatgaacgcgttaaccttcggcctgcttatcactgcgttgagtggtttcgctcaggggcaatcgctgacgttaattgctgcggaactggtggtaatggttgttgttggtattttctttattcgccgccagcattctcttcccgtaccgctgctaccggtggatttactgcgtatcccgctgttttcactttctatttgcacatctgtttgctctttctgcgcacaaatgctggcaatggtttccctgcccttttacctgcaaaccgtgctcgggcgtagtgaagtcgaaacaggtttacttctgacaccgtggccgttagcaacgatggtgatggctccgctggcaggctatttgattgaacgcgtacatgcaggattgctgggggctttagggttgttcatcatggctgcggggcttttttccctggttctgctgcccgcgtcacctgcggatatcaatattatctggccgatgatcttatgtggtgctggatttggcttattccagtcacccaataaccacaccattattacctccgcgcctcgcgaacgtagcggtggagccagtggcatgttaggaacggctcgtctactgggtcagagtagcggcgcggcgctggtggcgctgatgctaaatcagtttggagataatggtacacacgtctcgctgatggctgcggctattctggcagtgattgctgcctgtgtcagtggtttacgtatcactcagccacgatccagggcataaaaaaagcgcgtcgatcaggacgcgctttttagtatttacttcatattacttcaggtattcacccgtacgcagagcttcaattcgtttatccagcggcgggtgggtcatgaacaactcactgagcgatttcgacttaccgttaatgcagagagccatcatgctggttgcttcttgcggttcatagctggttttcaggcgctgcagcgcggcaatcattttctcgcgaccaaccagttttgccgaaccggcatcagcatggaattcacgatgacgcgagaaccacatggtgataatgctcgccagaataccaaacaccagttccagaaccgttgcaaccgcaaagtagatcagcgggttgccgttgctctcttcaccttcatcacgatttccgcccataaaacccgcggcaagctgcgccagaatacgggaaataaagataacgaaggtgttcaccacgccctgaatcagcgtcatggtgaccatatcaccattggcgatgtggctgatttcgtgagcaattaccgcctcggcttcatccgggctcatgttctgcagcaaaccggtgctgacagcaaccagagaggcatcacggcgcgcaccggttgcaaaagcgttgatgtccagcgcatggtagatagccacttgcggcatagcgatccccgcctgacgagcctgggttgctacagtattgaccagccaacgttccctttcgttacgcggttgctcgatcacttccccgccaacagatcgtaatgccatccatttggacatcagaagcgaaacgaaggaaccaccaaaaccgaacagcaaggccatgatcatcagcccctgaacgctgctcgactgtatccctgtcaggctcagtaccagcccgaaaacgaccattacggccaggttcgttagcaggaagagcgcgattcgcatcataattttctttttacctcagtttaacaaaacgcaatatgcgatacccacatcgtatgggttacgcgactattttcaagtctggatagtgcgtaagtcaccagaaagacacaactttacattttgtagcatctgatttacggcatcttgtcgctgttaaaaaatcaggcacaatttcttgtgcctgattgatattacttgacgggagcgggttgttccgcgggtctggctttttcaagcttcgccagatcgagtgcgatattcaccgtctcatccagataaggatccggctcctggtaatctttcggtagatcatccagtttcttcaactccggtttaccttcgcgtttaaagcgttcgttcaaacgcgccagacgcgtcgcatcatcttcattattctctttctcacgcacagcgtaattcagagaaacgatattgcgcttgtccttcatagcgttgaagcgcgcgatatccttcatgatgttctggaactcaggatctttcgcgatacgcgcattatgttccttcagcagctccggttcaaaggccgttaaatctcctgatttcacataagtcgcggcatcaatgctatcccacggcagcgcgttatcttcgaatttctcacccgtttccgtttcttcattacccgtcggcatgatgatgtctggcgttacgcctttacgttgcgtactgccgccgttaacgcgatagaatttctggatcgtgtactgcacagaacccagcgctggccattcaggacgtaacatctgatcgtaaatacggttcaatgaacggtattgctgaacggtgcctttaccaaacgtcggttcacccacaaccagcgcacgaccgtaatcctgcattgccgcggcaaagatttctgaagccgaagcactgaagcggtcaaccagcaccaccagcgggcctttatagaaaacctgtccgtcggtatcgctatcttcacgaaccttgccgttgttatcgcggacctgaacaatgggacccgcaggaataaacagaccggagagcgatacggcttcagttaacgccccaccgccattgctacgcaggtcgatgatgacgctgctgacattctgtttttccagtttctgcagttgcactttgacatcgtctgtcaaacccacatagaagcccggaatatccagcacgccgactttctctttaccgacggtcttcaccgacattttaaccgcgcggtcttcgagacgaatacgttcacgggtcaacgttacagtacgggtcttggtccctttaccagcaggtaaaatttccagacgaactttactgcccttcggccctttaattaaggcaaccacatcatcaagacgccagccaatcacgtcaaccatcggcttgcctgtttgaccaacaccgacaattttgtcaccaacgctgatagctttactcttcgctgccggaccacctgccaccatcgaattgataacggtgtagtcatcatccatttgcagcactgcgccaataccttccagcgacaaactcatttcagtgttgaactgttcggtattacgcggggaaagatagttggtatgcgggtcgatttcacgcgcaaacgccgtcattgccagcgagaaaacatcttcgctgttggtttgcgccagacgacgaatggcaaatttgtagcggcgagtcagggtttcacgaatttctttatccgtttttcctgtcagcttcaggcttaactcgtcgaatttgactttactgtcccacagcgcgttcaactcagcctcgtttttcggccagggcgctttgctgcggtcaaggttataagtgtcgttgccggtgaaatccatcggcttttccagtaccgacaaagcgtactggtaacgctcaaaacggcgcttttgcgccagattgtagagatcgtagaaaacgtcgagtttgcctgaacgcagttcatcgcctaactcggttttctttttcgcgaactgttcaacatcgcttgccagcagcacgttgtggctgtaatcgagcagattcaggtagcggtcaaagattttggccgaaaatgcctgatcgaggtcgaactggcgataatgagaacgggtgaagcgcgacgttacgcgctcacttaccgtcgcatgctgcgtctcttcctttaataccggaatttgatcagcacgcgtgatatcttctacagcgaaggtctggcctgctattgcaagcaggccagctaacgcggtaagcctaaaaaacatgttcatgcctggcccggcctccgtttcagaacaccaggtgttctgcgcgcacaatcaaagacatacccgaattcagctggacgcggacgccgtctttggtgatttctaatacggtggcatccatcgcgttttgacccgctttcaccttcagggcttgtccgacagtcagagctgaaatgtcagaaaccggggtgtgctgttcttcgcgaggtgcttttactgtttttggcgctttctctaccggcttttgcgcacgaggtttacgttcagcgccttctttgcggcgtggcgtagtcggacgtggcttgcgttcgcggcgcggtgcgtcttctttctcaccagcagttgcggcagcttcgcgttttttcgcttgctgttcagcacgctgtgcctgaacacgcgctttcgcttcttcaagctgcttgcgagcatgctctacatgttgctcgtccagctcaccgcatgggttgccgtcaagatcgacacgcgttgcgccgggtttaacaccgtaaagataacgccagctcgaagtgtagagacgtaaagcggatcgcaattgcgttttgctcaggttcatttccccagcaacacgatcgaccaaatcctgaaaaataccgattttcagcggacgcgcttcaccttccgcactgaaacagtggggaaaacgttcggccagaaacgcgattacttctttactgctattcaacttaggttgattttccatgaaatttcctgattacaacggacgtagccaacaagcgcaggcatgaacaggcgtcattataatgacgctatcagtaaatgctacgttatccgttgattatcctgcgacgctcgcaaagaattttttgtaatccgtcgttgcaagcactttttcaagctgtgccacaagctgacgtaagccttgctcgtcctcgtctgtaaagcgaccgaagacggtactatcgatgtcgagaacaccaataatctgatttttcaccaccagcggcagaacaatttcagaattactcgccgcatcacaggcaatatgcccgtcaaacacatgaacatcctcgatacgctgcacttgattgcgggcaaccgcagtgccgcacacgccgcgcccgacgggtatccggacacaggcaattttgccctgaaatggtccgagtaccagtgtatcgtcctcaagcaaataaaaacctgcccagtttatgtcagtgagacgctcatataacaacgcactggtgttcgcaagcgttgccagaaaactggtttctcccgccatcagcgcgttaaagtcgcgatttaaatccgcgtaaaattctgttttgttcattatataatcacttggttgtcttacctggatctgccagcctattaaaataagcattaaatgcgttaatgctcaagatcattcccatcatgggttaagattaatgttaattcttattacatttggcacgtcatggctcttaacacaccacaaattacgccgacaaaaaagataacagtgagggcaatcggcgaggaactgccgcgtggtgattaccaacgttgcccgcaatgtgacatgctgtttagcctgcccgagataaattctcatcaaagtgcctattgtccgcgctgtcaggcaaaaattcgtgacgggcgcgactggtcgctaacgcgcctggcggcaatggccttcaccatgctgttgcttatgccgtttgcctggggcgaaccgctgttgcatatctggctgttaggcattcgtattgacgccaacgttatgcaaggcatctggcaaatgaccaaacagggcgatgcgataacggggtcgatggtctttttctgcgttattggtgccccgctcattctggtgacctccatagcttatttatggtttggtaaccgactgggaatgaatttacgtccggtactgctgatgcttgagcgacttaaagagtgggtaatgctcgatatctacctggtcggcattggcgttgcttctataaaggtacaggattatgcccatatccaggctggtgtcggcttgttctcttttgtggcgttggtgattttaacgacggtgacgttgtcacatcttaatgtcgaagaactgtgggagcgattttatccgcagcgccccgctacgcgtagggacgagaaacttcgtgtctgtcttgggtgccattttaccggctatccagatcagcgtggtcgctgcccgcgttgccatatcccgctacgcctgcgtcgccgtcatagtctgcaaaaatgctgggcggcgctgttagcgtcaatcgttttattgttacctgccaacctgttgcctatttctatcatttatctgaacggaggacggcaggaagatacaattctttccggaattatgtcgctggcaagtagcaacattgcggttgcaggaatcgtgtttatcgccagtattctggtaccgtttactaaagtgatcgtcatgttcactttactgttgagcattcattttaaatgccagcaaggtttacgcacacgcattctgttactgcggatggtgacctggattggtcgctggtcgatgctcgacctgtttgtcatatctttaaccatgtcgctgattaatcgcgatcagatcctcgcttttactatgggaccggctgcgttttatttcggcgcagcggtaattttgactattcttgctgtggaatggctggacagccgcttactttgggatgcacatgagtcaggaaacgcccgcttcgacgactgaagcgcagattaaaaataaacgccgtatctcacctttctggctgctgccgttcatcgcgctaatgattgccagttggctgatttgggacagttatcaggaccggggtaataccgtcaccatcgactttatgtcggcggatggtattgttccaggccgtacgcctgttcgttatcagggcgttgaagtcggaacagtgcaggatatcagcctcagcgacgatcttcgtaagattgaagtcaaggtcagcatcaagtccgatatgaaagatgcgctgcgcgaagagactcagttctggctggtgacgccaaaagcatcgttggcaggtgtctccgggctggacgccctcgtcggtgggaactatatcggcatgatgccgggtaaaggtaaagagcaggatcactttgtcgcactcgatacccaaccgaaatatcggctggacaatggcgatctgatgatccacctgcaagcccccgatctcggttcgctgaacagcggttcattggtctatttccgcaagatcccggtgggaaaagtctacgactatgccatcaatcccaacaagcaaggcgtggtgattgatgtcctgatcgagcggcgttttaccgatctggtgaaaaaaggtagccgtttctggaacgtttccggcgttgatgccaacgtcagtatcagtggcgcgaaggtgaaactggaaagcctggcggcactggttaacggtgcgattgccttcgattcaccagaagagtcgaaacctgccgaggcggaagatacctttggtctgtatgaagatctggcccacagccagcgtggcgtaataataaaactggaactgccgagtggggccggattaaccgccgactcgacgccgttaatgtatcaggggctggaagtcggacagctgactaaactggatttaaatcctggtggtaaagtcacaggggaaatgaccgttgatcccagcgtcgttaccctgcttcgtgaaaatacccgcatcgaattacgcaacccgaaattatcccttagcgatgctaatctcagcgccctgctgaccggcaaaaccttcgagctggtgcccggcgatggcgagccacgcaaagagttcgttgttgtgccaggcgaaaaagcactgctgcatgaacctgatgttctgacgctgaccctgaccgcgccggaaagttacggtattgatgcgggtcagccgctcattcttcacggcgtgcaggtaggccaggttatcgatcgtaaactcaccagcaaaggcgtcacctttaccgtcgccatcgagcctcagcatcgcgaactggtaaaaggcgatagcaaatttgtcgtcaacagccgtgtcgatgtgaaggtggggctggatggcgttgagtttctcggtgccagcgcctcagaatggatcaatggcgggatacgtattctgccgggcgataaaggtgagatgaaagccagctatccactgtatgccaatttggaaaaagcgctggagaacagccttagcgatttacccaccacaaccgtgagtttgagtgcagagacgctgccggatgtgcaggcaggatcggtagtgctgtaccgtaaatttgaagttggtgaagtgattaccgtgcgtccgcgagctaacgcgtttgatatcgatctgcatattaagccggagtatcgcaaccttctgaccagcaatagcgtgttctgggcagaaggcggggcgaaagttcagctgaatggtagtggtctgaccgtacaggcatccccgctctccagagcattaaagggagccattagcttcgacaacctcagcggtgccagcgccagtcagcgtaaaggcgataagcgtattctgtatgcttccgaaacagcggcccgtgcggttggcgggcagattacgcttcacgctttcgatgccggaaaactggcggtcgggatgccaattcgctatctcggtattgatatcgggcaaatccagacgctggatctgattaccgcacgcaatgaagtacaggcaaaggcggtactttacccggaatatgtccagacctttgctcgcggtggtacgcgcttctcagtggtcacaccgcaaatttcggcagctggcgttgagcatcttgatactatcctccagccgtatatcaacgtcgaaccaggccggggcaatcctcgccgcgactttgaattacaagaggccaccattactgattcgcgttacctggatggcttaagcattattgttgaagcgccggaagccggttcgttaggcatcggtacgcctgtgctgttccgtggtctggaagtcggtacggttacaggaatgacgctggggacattgtcagatcgcgtgatgattgcgatgcgcatcagtaaacgctatcaacacctggtgcgtaacaattccgtcttctggttggcatcgggttacagtctggactttggtctgacgggcggcgtagtgaaaaccggcacctttaaccagtttatcagtggcggcatcgccttcgccacgcctccgggtacgccactggcaccgaaagcccaggaaggcaaacacttcctgttgcaggaaagtgaaccgaaagagtggcgtgaatggggaactgcgcttcccaaataatgcccactgctccggcgtgcctgcgccggagcgtttatgctaaactgcgcgcctgtttttttgccagtggtacatgctcgtggcccaacacaccgtttatttcccggacgcctttctgacacaaatgcgcgaagcgatgccttcgacgctctcatttgatgattttcttgccgcctgtcagcgcccgttgcgccgcagcattcgcgttaatacgctgaaaatctccgttgctgatttcctgcaattaaccgctccttatggctggacgcttacgccaattccgtggtgtgaagaaggtttctggattgaacgcgacaatgaagatgcattgccattgggtagtaccgccgagcatttaagtggcctgttttatattcaggaagccagttcaatgttgcctgttgccgccttgtttgctgacggtaatgcaccacagcgggtgatggatgtcgctgccgcgcctggctccaaaacgacgcaaatttccgcgcggatgaataacgaaggggcaatccttgccaatgagttttccgccagtcgggtaaaagtgttacatgccaatatcagccgctgtggtatcagtaatgttgcgctcacacattttgatggccgcgtgtttggtgcggcagtgccagaaatgttcgatgccattttgctggacgctccctgctctggcgaaggcgtggtgcgtaaagatcccgatgcgctaaaaaactggtcaccagaaagcaatcaggaaatcgcagctacacaacgggagcttatcgacagcgcctttcatgcattacgtcctggtggtacgctggtttactcgacctgtaccttaaaccaggaagaaaacgaagccgtttgcctgtggctgaaagagacttaccccgacgcagtagagtttttaccacttggcgatctcttccctggtgcaaacaaagcgctgaccgaagaaggctttttgcatgttttcccacaaatttacgactgcgaaggcttcttcgttgctcgtctgcgtaaaactcaggcgattcccgccttacccgcccccaaatacaaagtcggtaattttccgttcagcccggtgaaagatcgcgaagctggacaaattcgtcaggcggctacaggtgttggcttaaactgggatgaaaacctgcgcctctggcagcgtgacaaagaactgtggttgttcccggtgggcattgaagccctgatcggtaaagtccgattttctcggttggggattaaacttgccgagacgcacaacaaaggttatcgctggcagcatgaagcggttattgctcttgcctcacccgataatatgaatgcattcgagctgacaccgcaggaagcggaggagtggtatcgcgggcgcgatgtttacccgcaagccgcgccagtggcggatgatgtattggttactttccagcatcaaccgattggtttagccaaacggattggttcgcgattgaaaaacagctatccgcgtgaactggtgcgcgatgggaaactttttaccggtaacgcctgacagcgcacaaaaaaagcgcactttttgactggcacattcggctgcctcaactaggctgaaaaatggtgcgatcggactggtcgtaccacaatcggcagctaaatggagagcacgaagatgaaaaccagtgtgcgcataggcgcttttgaaatcgacgacggcgaattacacggtgaatcgccaggtgatcgaacgttaaccattccttgtaaatctgaccccgatttatgtatgcaactggatgcctgggatgctgaaaccagtatccctgccctgctaaatggcgaacactctgtcctttaccgtacccgttacgatcaacaatctgatgcctggattatgcgtcttgcctgatccaaaaagaacccgtcggcatggcgggttatttgtcctggttattcccccgttgtaaaatctctcctaaacttaacggtacggcaccacacttcggggatgaaatgttcgcgctggtactttttgtttgctacctggatggcggttgtgaagatattgttgtggatgtctacaacacggaacagcagtgtctttattctatgagcgatcaacggatccgccagggcggttgttttccgattgaggattttatagatggtttctggcgacctgcacaggagtacggtgatttttaattattgcaattgcacaagagtcagttcgcccccaaagacagcaccggtatcaatataatgcaggttgccaatatccacgcgatgtcgcaacggtgtatgaccaaaccagaaatgatcagcacctgtaattccctgccctttttggcgttcacctaatcgcgagcggctccacaagacctgatgcaaatcaacgtccttttgccattcataaacatcatctggataatcggcatgagcaataacatgcttgccggtgcgactgtgtacttcaagaataaagggcaaatgctgacatttttccagcgccgttttcgcttgtttctgttgattatctgccagcgcaataaaccagtcgccgccattcatcaaccacaaagacatctgctgggatgccagcgcatccatcgccatctgttcatgattgcctcttaccgcacaaacccaatgttgttccagtaactgcagacaacgtaaactttgcggcccacgatcgataacgtctcccactgagataagtaaatctcgccacggatcaaaacgacaatgccataatttgcggcgcaactgctcaagacaaccgtgtatatcgccagaaagccagatatgtcgccattgatgacccgcaattctctgataaacgggcgcaggctgtttcatcaatattttcctcccgcgctaaagatcacataatcttaacaagaatgttaaaaaacgctggactcagacagtagagtgtgtgttatggttgactataaagtcagcgaaggaaatgcttctggcttttaacagataaaaagagaccgaacacgattcctgtattcggtccagggaaatggctcttgggagagagccgtgcgctaaaagttggcattaatgcaggcttagttgccttgccctttaagaatagatgacgacgccaggttttccagtttgcgtgcaaaatggtcaataaaaagcgtggtggtcatcagctgaaatgttaaaaaccgcccgttctggtgaaagaactgaggcggtttttttattggaaatcaaaaggctattttaggtaattaacagagtttttcagctcgttctataaacggtgccagactcattttttcgccgggattgttaggatcatcaatctgaatcaccgaaatgggttgggcattggtcttcccactggcaacttccttttgtgcgatatcgtttaaaggatactgcacgagggtactcggattaataacatacaaagcattacccggtcggcaagtcagcatcacctcttcgcgattaaacgcccatttgtctttacccacttcaaaacgactgacggtaatcacctgcggtgcagccagcgccgctgcagaactggtgagtaacagaaacgccagaatactttttttcatcattttcgtaatccatcaaaaaggttcgagagtcgcaagcaggctgatgatcaccagcactaccgcacctatcgcccattcgagtttagtcatccacacaaaccagggtgccgcacgatcttcatcctgcctcatgcgcggtacaagaacataacgattagccagcgcaatgaccaccataatcatcaccaggatggctttgagcaataagagttggccccagtaagtcgtaagcgtggggggaaatccggtaatcaacaatgcattaagcacgccgcttgccagtacgccgatcaccgcaaaatgcccgcaccaggaaaaacgcatcagcgcctgaatagcctggtgtcgccaacggcctttgatgagttgcatacaccagagcaccggcagtaatcccccaaaccacgccgccgcacaaatcaggtgaatcgcgtgattagtctgatggattttcgctgttaccccttcattcagcgtcgcatgccccactcccgccagcagaataaattgcgcggtagtgagcataaacagcaaacgtggcatattccgcggttgcataagggcgacgatcaacgttacgagggcgagaacaatttgccataaccagatgccaccaaactgcgtttgcaaaacagcctgccaaatgtttggcgaaaatacatctgtccatcccgttcccatcaacccgccctgaacggcgagcattgcagtggcactgatcaaactccagacggcagcgtgctgttgtaaacgcagaaaacgcttcgccagcaagcgacgaatcgtcaagggggccagccaggcaccgtacattgcgaagccaaaaaccagcatcagcgaggtgaaatggataaatcgcagcgcgatccaggtaaacgccagcatgatttatttcacgctaaaggtgtagtgtcctttcgttttatgcccgtccaccgaaacaacatgccagtcaacggtgtaggttccgggtttcagcgaatcggccagtggaacaatcagttgcttttggtcctgctcatttcgcttcgccggtaatgttttaatattttcgttttttggccccgtgatttttgcaccactgaatcctgtttcaacaccttccgagaagtttaaagtgattgcctgcggtgcagctgtcacttgcgcgtttgccgcaggatactgatgcgttaaatgcgcatgtgcccagacggaaggtgtcaccaacgaagtggtcaggattgccagcgcgtagcgaagggagcgtgcagttgaagccatattatctattcctttttgtaataacttttttacagagcataaccttgtctaatgtctgagtcgaggatcatcaattccggcttgccatcctggctcactcttagtaacttttgcccgcgaatgatgaggagattaagaatgctgaagaatctggctaaactggatcaaacagaaatggataaagtgaatgtcgatttggcggcggccggggtggcatttaaagaacgctacaatatgccggtgatcgctgaagcggttgaacgtgaacagcctgaacatttgcgcagctggtttcgcgagcggcttattgcccaccgtttggcttcggtcaatctgtcacgtttaccttacgagcccaaacttaaataaaacttatacagagttacactttcttacataacgcctgctaaattatgagtattttctaaaccgcactcataatttgcagtcattttgaaaaggaagtcattatgtcgttctggaaagttgcagcagcgcaatatgagcctcgtaaaacctcactcaccgaacaggtagctcatcatctggagtttgtgagggccgccgccaggcaacaatgtcagctgttagtttttccatcgctttctttactggggtgtgattattcgcgacgtgcccttcctgccccacccgatctctcactgttagacccgctttgttatgccgcaacgacctggcgaatgaccatcattgccggccttcccgttgaatataacgatcgctttattcgtggaattgcggtgttcgcaccgtggcgaaaaacgcctgggatctaccatcagagtcatggtgcatgtctgggccgtcgttccagaaccatcacggtggtcgatgaacaaccgcaaggtatggatatggacccgacctgttcactgtttactacagggcaatgtctgggagaacccgacctgctggcgtcggcccgtcgcttacaatttttttcacatcagtactcgattgccgtgctgatggcaaatgcccgtggtaacagtgcactatgggatgaatatggtcgtctcatcgttcgcgccgatcgtggttcattattgttagtcggtcagcgttcatcacagggttggcaaggcgatatcattccattacgctaggctttttcggcctggagcatgccatgttgcgcattatcgatacagaaacctgcggtttgcagggagggatcgttgagattgcctctgttgatgtcattgacggaaaaatcgtcaaccccatgagccacctggtgcgccccgatcgtcctattagtccacaagcgatggcgattcatcgcatcaccgaagccatggtcgccgataaaccgtggattgaagatgtgatcccacactattacggtagtgaatggtatgtcgcgcataacgccagctttgaccgccgcgtactgcctgagatgcccggtgagtggatttgcactatgaaactggcccgtcgtttgtggcctgggatcaagtacagcaatatggcgttatataaaacacgcaagctcaatgtacagacgccgccgggcctgcatcatcaccgcgcgttgtatgactgttatatcaccgccgcgttgcttatcgatattatgaacacctccggctggacggcagaacagatggccgatatcaccggacgtccgtcgttgatgacgaccttcacctttggcaaataccgtggcaaagcggtttccgacgttgccgaacgcgatccgggctatctgcgctggttatttaataacctggacagcatgagcccggagctgcgtttaacactgaaacattatctggaaaatacttagtccgcaggcgtagcgggtaatgttccctgcgccagcgcgaccagaaaagcatattccatcgctacgccttcgtacgatttaaagcgaccagatttaccgccatggcctgagtccatgtcggtacagagcaataaaagatggtcatcggttttcagctcgcgcaatttagcgacccattttgccggttcccaatattgcacctgagaatcgtgcaaaccggtcgttaccagtaaatgcggataagcctgtgcggtgacgttgtcatacgggctgtagcttttcatgtactcgtaatattgcggatcctgcgggttaccccactcttcaaactcaccagtggtaagaggaattgattcatcaagcatcgttgttacaacatcaacaaacggtacctgggcgataacgccgtggaataattccgggcgttgattaattgcaacgcccatcaacatgccccccgcactcccgcccatcgcataacaaagcgaaggagagccatagcccagttttaacaatgcatcgcaggcatcaagataatcattaaacgtatttttcttcttcagaaattttccgtcttcgtaccattgttgccccagctcaccaccgccgcgaacatggacaatggcgtagacaaagccacgatctaacaaactcaagcggctaaaactgaaatcggcatcaatacttgcgccgtaagaaccatagccatacaccagcaacgggttgtgtcctttgcgaaaatgtttgcgatggtagaccaacgaaaccggaacttcgacgccatcacgggcgactatccacaggtgttcactgcggtaattcgccgcataaaaaccaggaacttccgtttgttttaatacacgacgctcaccggtatccatatccagttcaaacaaagtgtctggtgtagtcatggaagaataaccataacgcaatcgcgcggtttcaggttctggattgtaggcaatccaggtcacataggccggatcatcaaaggcaataccaatgacttcccgggtcttgcggttaatttggcgcaaactggttaacccgcgctgacgctcttcaaccaccagccagtcggtaaacagcgtaaacccttccagcatgatgttttcgcgtggcggaattaactcttcccactgttgctcatcacgcatacgggtacggtataagccaaagtttttgccgtggcggttggaacgcagataaaaacgatgctggtagtgatcaaggctgtattcgtgatctttgcggcgcggcagaaaaacaaacggctcggcatcggccatttccgcgtccagcaggcgaacttcactggtggtggcgctggccaaatgaatgactacatagtgcttcgaggtcgttttatgcaggctgacgtaataggtatcgtctttttcttcgtagatcagtttatcttgcgatgctggcgtaccgatggcgtgacgccagacctgataaggcagcagcgtcaccggatgcttgcgaacatagtagaaaatccaggagtcatttgcccagacaaagctgggttcaacgttatccagcagttccgggtaccagttaccagtttccagattacgaaaacgaatgccgtactggcgtcgggaaagaaaatcttctgccagcgccataatggtgttatcgggcgtaatcgccattccgcccatcgaataaaactcactatgagctgcgcgcttattggcatcgagcaatgtttcccactcatcccactcttcactgaatgccgattgacgctggtagatagcatattcacagcctggttcataaatatgccgatagcggtagccatttttgatgtagggcgcagaaacttctcgttgcggaatgcggtcgatgatttcttttaagatgcgatcctgcaaggcttgttgtgaggccatcacccgatgaccgtaactattttcttgttgcaggtagtccaggacttctggctgagaacgcgtatcgtcccgcagccagtagtaattatcgatgcgcgtatcgccatgaagcgtcatggcgtggggaatgcgggcggcttttggtagcatgttattgttctttctggttgaaacatcttataagggtggcaaaactcaccggggatgcaagcgaaacaggggagtcattgcttagatgatgacaggtaatggcgcggatatcgaatgttatgcagacagagaaaatcagcctgttcaaatggctgtgcgattctggatagcccgaaatagtcaacttcaggctatccagagagcggaattattccgccaaagtgcgtttttgctgttcgagatcgcgttcaatgccgtcacgaacatcctgggggattttcagcgcgtcacccagtgcattcaggtaactgcgttccataaaatggtcaatatcaatagccgcgcaactcaggaaatagatttccagcgcctcttcttcattgcggaccccggtagccaggcgttgtggatccagcggttgttcgattgcctgctcaatgagtacacgcccctgctcttccacgccggctccacgcaattgctggtcgattgccgcacgttctttggcatcaatatgaccatcacttttagcggcaaagaccagcgcaaggatcaaacgtgctgtacgctcatccagcggcgtactttgcgcgccaaactgcggttcgtcctgatgcgccgcgcgaattttatctttgtatttattccacagcaccgtacccgctaccgctccgccgccaaccagtaacgcgttggtgccatatttcgtaagaagtttacgtgctgatttatttgcgaccagcagcccagccagtccgcctaatgcgcctggcactaacagtttgaccaatccctgatccgcagacgaggaggtagaagaactgctttgcccaagcagggattgcagttgatttaaccagttagccatatttgctcctcaataaccatttttagtgcctgtagcatagcggatgaggatgtcagaaaatgtatatcgagacaaaagatgcgcaaataagcggggcggtaggccgttattcaaagaaattcgcgccaggtaaggtatttactgtatatcaggtgataagggtattttaggtgaaagtagtttgtcgttttgagtggcattgtttgatgctgattgcccgatgcgacgctgttgcgtcttctcaggcctacgattgtggtgcgttctggggcggacaaggcactcgcgccgcatccgccaacagtcaatcgaattatcagaagccattaacgccgctgatattccgccattcccgctttgcagtccacgctgacctggtaatgaatatcggcacttttaccacgcacggttagcggtactgaccatttatcatctttaccctgaatgtcctgcaaactgacccaagccacgggatcggcctgaccgacaattttttgatcatctgcccaacgcgccacgcgattttgttgataatcacgttttacgctcgcggcaattccggcagcatccagaccttcacactttgggaaagtgaccgacttgctggtttcattattggcagcgaaaactgatgcgcaggcagaaaccaacaacagccctaaaaacgcccctctttttttcatgtttttctccatagcacaatgattcaggagaaagcatggtacaaattgtcaggagcgcaagttgcttcaggccgcgtgtgaggcatcttcctcttcggattcagcaccgacgacctgtggggacggtaatttgccggttttcagaatggtgctcagcacatctttttgttctgccagccatagcgaaagggcttcacgttgctcgtcttccatttgcacaggagaatttgtcagccaggtgtcaagcagatccgccgtatcaagcattttgtcataagcatcggcttcctttttgctggtaaacgacattttctcttcgccctcacgaatgactacgtatttaacttcaaccgccatttgcagcctctcataataactgtgattttatacagtatatttcttttcggttgagaaatcaacatcagcaataaagacacacgcaaacgttttcgtttatactgcgcgcggaattaatcaggggatattcgttatgacgttattaggcactgcgctgcgtccggcagcaactcgcgtgatgttattaggctccggtgaactgggtaaagaagtggcaatcgagtgtcagcgtctcggcgtagaggtgattgccgtcgatcgctatgccgacgcaccagccatgcatgtcgcgcatcgctcccatgtcattaatatgcttgatggtgatgcattacgccgtgtggttgaactggaaaaaccacattatatcgtgccggagatcgaagctattgccaccgatatgctgatccaacttgaagaggaaggactgaatgttgtcccctgcgctcgcgcaacgaaattaacgatgaatcgcgagggtatccgtcgcctggcggcagaagagctgcagctgcccacttccacttatcgttttgccgatagcgaaagccttttccgcgaggcggttgctgacattggctatccctgcattgtaaaaccggtgatgagctcttccggcaaggggcagacgtttattcgttctgcagagcaacttgctcaggcatggaagtacgctcagcaaggcggtcgcgccggagcgggccgcgtaattgttgaaggcgtcgttaagtttgacttcgaaattaccctgctaaccgtcagcgcggtggatggtgtccatttctgtgcaccagtaggtcatcgccaggaagatggcgactaccgtgaatcctggcaaccacagcaaatgagcccgcttgcccttgaacgtgcgcaggagattgcccgtaaagtggtgctggcactgggcggttatgggttgtttggtgtcgagctatttgtctgtggtgatgaggtgattttcagtgaggtctcccctcgtccacatgataccgggatggtgacgttaatttctcaagatctctcagagtttgccctgcatgtacgtgccttcctcggacttccggttggcgggatccgtcagtatggtcctgcagcttctgccgttattctgccacaactgaccagtcagaatgtcacgtttgataatgtgcagaatgccgtaggcgcagatttgcagattcgtttatttggtaagccggaaattgatggcagccgtcgtctgggggtggcactggctactgcagagagtgttgttgacgccattgaacgcgcgaagcacgccgccggacaggtaaaagtacagggttaaacccggcaaaaaaacgctacaaaaatgcccgatcctcgatcgggcattttgacttttacagcttagcgccttctacagcttcacgcgccagcttagtaatgcggtcgtaatcgcccgcttccagcgcatctgccggaaccagccaggaaccaccgatgcacagcacgcttttcagcgccaggtagtcacggtagttagccggagaaataccacccgtcgggcagaaacggacctgggagaacggacccgcgatcgcctgcagggctttcacgccgccgttagcttcagccgggaagaatttgaactctttcaaaccgtagtccatacccagcatcagttcggaaacagtgctgatccccggaatcagaggaatagtcccttcggtagcagctttcagcagcggctcggtcagacccgggctaattgcgaactgtgcacccgcttcagtgacttctgccagctgctgtggattcagcaccgtaccggcacccacaatcgcttcaggcacttctttggcgatagcacggatagcgtcaactgcacactcggtacgcagagtcacttccagaacgcgcaccccaccagcaaccaacgcttttgccatcggcaccgcgtgttccagtttttttaccacgataaccggtacaaccgggccggtggtcaggattgattctgcacttgttttccagtttttcatcagagttttctctcgcctgattacaaatttgtcgtcttaaaaagtgatacaggttgcgccctgttcggcaccggacagtttttcacgcaaggcgctgaataattcacgtcctgttcccacgcgtgacgcgctcaggtcaggaatgtgcggttcgcgagcagccagttccgcttcgtctaccagcagcgtcagttcgcctgtctgtccattcacacgaatgatgtccccgtcgcgcacttttgccagcagcccgccatcgtaggcttctggtgttacgtggatagctgacggcactttacctgaagcgccggagagtcgtccatcggtaactaacgcaattttgaaacaccggtccaataatacaccaagtggcggcatgagtttatgtaattctggcattccgttcgcttttggcccctgatgacggacaacaacgacacaatcgcggtccagcaaacccgcttcaaaggccggcataacgtcatgctggctttcaaaaacaaccgctggcgcttcaatcacctggttctcaaccggcacggcagaggttttcataaccgcacggcccaggttaccgcttaacacttttgtcccaccatgatgagagaaaggttgttcgaaggaagcgatcacattgctgtcgagtgatttttccgccccttcccgccagtccagttcaccattattcagccatggttcaagggtataacgagacagaccaaaacctgccaccgtattgacatcttcatgcagcaggcctgctttgagcagttcacgcaccagaaccggtacgccacctgccgcctggaagtggttaatatcggccggaccgttcgggtagagacgtgccatcagcggtacaacatcagaaaggtcagagaagtcatcccagttaatctgaataccggccgcgcgcgccatcgccaccaggtgcatggtgtggttagtggaaccaccggtcgccagcagtgcaacgataccgttcaccaccactttctcatcgatcatcttaccgatcggcatccattcattaccattaccggtcatgcgtgtaacctgacgcgcagctgcggcggtcaaagcatcgcgcagcggagaatccggatgaacaaaagaagagcctggcaactgcatccccataaactccaccaccatctggttggtgttggcagtaccgtagaaagtacatgttcccggcgcatggtaagacgcggcttctgactccagtaaggccatgcggtccactttaccttcggcataaagctggcgaatacgcactttttctttatttggcaaaccgcttgccatcggtccagacggcacaaacaccgcaggcaaatgaccaaacgacagggctgccatcgtcagacccgggacaatcttgtcgcacacaccgaggaacagagcaccatcaaacatgttatgggacagccccaccgccgcagacatcgctatcacttcgcggcttagcagcgacaattccattccatcctgcccctgggtgacaccatcacacatcgccggaacaccgcccgcaacctgaccaaccgcattcgcttcatgcagggctttacgaatgatttctggatagtgttcataaggctggtgcgcggagagcatgtcgttataggaggtgatgatggcgatattgttacgcaacatgcttttcaaagaggctttgtcttctggctggcaggcagcgaaaccgtgtgccaggttaccgcatgccaactgcgaacgatgaacggtcgaagttttcgcttgttctatccgggcgagataagcagagcgagtctcgcgcgaacgttcaatgattcgatttgttacgcgtaacgattgtggattcataaaggctcctgaaattgagttgtcagagcaggatgattcacaacgcgtttcattcagaggatttatgactgaaacgcctgtaaccggagctcatagggcaaaaacgtttcagtcagtgtaataaaaaaagcctcgtgggtgaatccgcacgaggcctgaaagtgtaaaaattgttctacaatctgcgcaagatcatgttaccggtaaaataaccataaaggataagcgcagatattactcaaactcattccaggaacgaccatcacgggtaatcatcgccaccgaggcaacgggtccccaggttccggcctgatacggtttcggcgcatcattgtccatcgcccacgcctcagtaatggagtctacccatttccaggcttcttccacttcgtcgcgacgtacaaacagtgcctgaataccacgcatggtttccagcagcaaacgttcataggcatccgccagatgcgtctgattaaaggtttctgaatagctcagatccagcttggtgatttgcaggttatgtttgtggtcaaggccaggaactttattcagtacctggatatccacgccttcatcaggttgcagacggatagtcagtttattctgcggcagatcctgccacgattctttaaacagattcagttcaggtgttttgaaatagaccacgacttcagaacatttggtcggcagacgtttaccagtacgcaggtagaatggcacaccggcccagcgccagttatcaatgtcgacgcggatcgccacgaaagtttctgtattgctgctcttgttcgcgccctcttcttccagatatcccggcacttttttgccctgggcgaagcccgcagtatattgcccgcgtacggttttttcgcgtacgttggagcggtcgatgcggcgcagagacttcagtactttcactttttcatcgcggatgctgtctgcgctcaggtcagacggcggagacatcgcaatcatgcaaagaatttgcagcaggtggttctggatcatgtcgcgcatctgaccggctttatcaaaatagccccagcgcccttcgatccccacttcttctgccacggtaatctcaacatgatcaatggtgcgattgtcccagttattcacaaacagggagttagcaaaacgcagcgccaacaggttcagcaccgtttctttaccaagatagtggtcgatacggtaaacctggcactcctcgaagtattcgccaacctgatcattgatttcctgcgaggtcgccagcgacgtccccagcggtttctccatgactacgcgtgccggtttagcattcagttttgcctcgccaagccctttgcaaattgcgccaaaagtgctgggcggcatggcaaagtagttaatggtgatacgatttttttgatccagcatcgcgccgagacggctgaatgcagcagtgtcattgacatcgagattacaaaaatccagacgtgcactcagggtgtcccataaaccttcatcaatggtttctttcatgaaagtttcgagcgcctcgcggacaactttggtatatgccgctttatcccagtcagcacgccctacgccgataatccgggtgtccgggttgagctgaccggctttttccagttgatacagggaaggcagcaatttacgacgcgcaaggtcgcctttcgcgccgaaaatgaccaggtcacaggcctgggctgtttgcgttaccgccatgtcattctccttaagttaactaacccggtacttaagccagggtatacttgtaattttcttacggtgcactgtactgcttttacgagcttgcgaaaactgtaaacgcttatccacccgtgcgattacgggaaaagcgcgcaaagtgcggcaaaactgataaaaaaatcatcgttttccattgggtaaaaatctgacactgatcatgttatgaaaaaaataacaacttttttatctgcttttgtcattaacacggcacacaggcgtaatatctgacaaaactgcatttcgatttctttcagtgcggaaatcgtcattacccgtgagtctctttacatcatgaatatgctggaaaaaatccagtctcagctggaacatttgagcaaatcagagcgcaaagttgccgaggtcattctggcttcgcccgataacgcgatccattcgagtattgctgctatggcactggaagccaatgttagcgaaccgacggtgaatcgtttctgtcgcagcatggacacgcgcggttttcctgattttaaacttcatctggcacagagtctggcgaatggcactccctatgttaatcgcaatgtcaatgaagatgacagcgttgaatcatacacagggaaaatatttgagtccgcaatggcaacgcttgatcatgtccgtcattcactggataaatctgccatcaaccgcgccgtcgacttgctcactcaggcaaaaaaaatcgcctttttcggattaggctcttcagccgccgttgcccacgatgcgatgaataagttctttcgttttaatgttccggtggtgtactccgatgatatcgtgctgcaacgcatgagttgtatgaattgtagcgacggagacgtggtggtgctgatttctcacactggaagaacaaaaaatctggtcgagctggcgcagctggcacgcgaaaacgacgccatggtgattgccctcacctctgcgggtaccccgctcgcccgggaagcaacgctggcaattaccctcgacgtaccggaagatactgacatttatatgcccatggtttctcgacttgcacagctgaccgtgatagatgtgctggcgacaggatttactttgcgacgcggtgcaaaattcagagataacttgaagcgggtcaaagaagcgctgaaggaatcgcgttttgataagcagttacttaatttaagtgacgatcgctaaaaacgactgtcactgtcctaatcttatacgacatccgaatgagattaatttatcgccatcgcggcgttatttcattcggatttcatgttcaagcaacacctggttgtttcagtcaacggagtattacatgtccagaaggcttcgcagaacaaaaatcgttaccacgttaggcccagcaacagatcgcgataataatcttgaaaaagttatcgcggcgggtgccaacgttgtacgtatgaacttttctcacggctcgcctgaagatcacaaaatgcgcgcggataaagttcgtgagattgccgcaaaactggggcgtcatgtggctattctgggtgacctccaggggcccaaaatccgtgtatccacctttaaagaaggcaaagttttcctcaatattggggataaattcctgctcgacgccaacctgggtaaaggtgaaggcgacaaagaaaaagtcggtatcgactacaaaggcctgcctgctgacgtcgtgcctggtgacatcctgctgctggacgatggtcgcgtccagttaaaagtactggaagttcagggcatgaaagtgttcaccgaagtcaccgtcggtggtcccctctccaacaataaaggtatcaacaaacttggcggcggtttgtcggctgaagcgctgaccgaaaaagacaaagcagacattaagactgcggcgttgattggcgtagattacctggctgtctccttcccacgctgtggcgaagatctgaactatgcccgtcgcctggcacgcgatgcaggatgtgatgcgaaaattgttgccaaggttgaacgtgcggaagccgtttgcagccaggatgcaatggatgacatcatcctcgcctctgacgtggtaatggttgcacgtggcgacctcggtgtggaaattggcgacccggaactggtcggcattcagaaagcgttgatccgtcgtgcgcgtcagctaaaccgagcggtaatcacggcgacccagatgatggagtcaatgattactaacccgatgccgacgcgtgcagaagtcatggacgtagcaaacgccgttctggatggtactgacgctgtgatgctgtctgcagaaactgccgctgggcagtatccgtcagaaaccgttgcagccatggcgcgcgtttgcctgggtgcggaaaaaatcccgagcatcaacgtttctaaacaccgtctggacgttcagttcgacaatgtggaagaagctattgccatgtcagcaatgtacgcagctaaccacctgaaaggcgttacggcgatcatcaccatgaccgaatcgggtcgtaccgcgctgatgacctcccgtatcagctctggtctgccaattttcgccatgtcgcgccatgaacgtacgctgaacctgactgctctctatcgtggcgttacgccggtgcactttgatagcgctaatgacggcgtagcagctgccagcgaagcggttaatctgctgcgcgataaaggttacttgatgtctggtgacctggtgattgtcacccagggcgacgtgatgagtaccgtgggttctactaataccacgcgtattttaacggtagagtaagtacgttgccggatgcggcgaaaacgccacatccggcctacagttcaatgatagttcaacagatttcgaatattctgaagcaaacttgaacttatcatcaggcgaaggcctctcctcgcgagaggcttttttatttgatgggataaagatctttgcgcttatacggctggatttcgcccggtttgcgagttttcagcaattttagtatccaggtgtattgttctggtcgcggaccaacaaaaatctcgacttcttcattcatccgccgcgcaatcgtatgatcatccgcctctaacagatcatccatcggtgggcgcacctgaatcgtcagacgatgcgtcttgccatcataaatcggaaacagcggtacaacgcgcgcacggcacactttcatcaaacgaccaatcgcgggcaacgtcgctttataggtggcaaagaaatccacaaattcgctgtgctctgggccatgatcctgatcgggtaaataatatccccagtacccctgacgtaccgactggatgaatggtttaataccgtcatttctcgcatgcagacgaccgccaaagcgacgacgcaccgtgttccagacataatcaaaaaccgggttgccctgattatggaacatcgctgccattttctgcccttgcgaggccatcagcatggcaggaatatcgacggcccaaccgtgcggcaccagaaagataactttctcgttattacgccgcatctcttcgatgatctccagcccttgccagtcaacgcgcggctgaattttctccggcccgcgtattgccaactcagccatcattgccatcgcttgcggcgcggtggcaaacatctcatcaacaatcgcttcgcgttcagcttcactacgttctggaaagcagagcgacagattgattaacgcacgacggcgtgagctttttcccagtcgtccggcaaaacgtcccagccgtgccagaatgggatcacggaactttggcggcgttaaagcgatacccgccatcgctgctacgcccagccatgctccccagtagcgcgggtggcgaaaggatttatcaaactcaggaatgtattcgctattattttttttcgtttccatgcttttccagtttcggataaggcaaaaatcaatctggtgatagtgtagcggcgcaacttgccccgcaccaaataaaaaaagccggtactgactgcgtaccggctgcgaatggatgttaattaatcaaaccgtagctgcggcacaatctctttggcctgcgccaggaattcgcgacgatcggagccggtcagcccttcggtacgcggcagttttgccgtcagcgggtttacggcctgctggtttatccatacttcatagtgcagatgcggcccggttgaacgtccggtattaccggaaagcgcgatacggtcgccacgtttcaccttctgtcccggtttcaccagaatcttgcgcaagtgcatataacgcgtggtgtagctgcgaccatgacgaatagccacataataacctgctgcgccactgcgtttggcaaccaccacttcaccgtcacccactgaaagcactggcgtaccctgcggcatggcgaaatcaacacctctgtgtggtgcaacgcgaccggtcaccggattagtacgacgcgggttaaagttagacgagatacggaactgtttcgccgtcgggaatcgcaagaatcctttcgccagaccagtaccgttacgatcgtagaatttgccatcttcagcgcggatagcgtaataatctttaccttctgaacgcaaacgtacgcccagcagctggctttgctcacgtttaccatcaagcatttctcgagacattaacaccgcaaattcatcgccttttttcagtttgcggaaatccatttgccactgcatggctttaatcactgcgctcacttcggcgctggttaaaccggcgtttctggcgctggcaacaaagcttcccccgacggtacctttcagcagattgttaacccactctccttgctgcatttcgctggtcattttaaaaccgttagcggcagtacggtcataggttcgggtttcacgacgagacacttcccaggtgaggcgctgcagttcgccgtccgcggttaatgtccaggagagttgttgaccgattttcaggttacgcaattctttgtcggccgcagccagttgggtgatatcacccatatcaataccatactgattgagaatgctgcttagcgtatcgccagtggaaacaacatattcatgcacgcccgcttcaccggcgattttgtcatccagttcgtcctggggaatggcttcatcttcttgtgcagcttgatcaatcggctcactggcttcaggtaagagcgaacgaatttcgttctgttccagctcaatggttttgacaattggcgtggcatcacggtgataaacataaggccgccagacagcgacggccagagtaagaacggtgagcgaccccaacataacgcggtgtggtcgcggtaaattattaaacgccagggcgacagagcgggctatctgttgcacgtaatcacttcctcattaatctcctttcaggcagctcgcatactggttggctaattgactcaggaattctgaatagcttgttttacccagtttgatattcgtccccaggggatccaacgttcccatacgaacggatgtccctcgtgcgacgctctcaacgaccgctggcctgaactgtggctcagcaaaaacgcaggttgctttttgctcaaccaactgtgttcttatttcatgtaaacgctgcgcgccaggttgaatctcagggttaacggtaaaatgaccaagcggtgtcagtccaaactgtttttcgaaatagccgtaagcatcgtgaaaaacgaaataacctttccccttgagcggcgcgagctcgttaccaacctgcgtttcggttgaggctaattgtgcctcaaaatccttcaggttggcgtcaagtttggctcgactttgcggcataagttccactaattttccatggattgcaaccgctgtagcccgcgctatctctggggaaagccaaagatgcatgttgaaatcgccgtgatggtgatcttcgtcacttttttccgcgtggtcgtgatcatcatcatcgccgtgaatacttttcatcagtagcggtttcacatcttcaagctgcgcaatcgttacctgcttcgctcctggtaatttgcttaccggtttttgcataaacgcttccatctccgggccaacccaaacgactaagtccgcgttctgtaagcgttttacatccgatgggcgcagtgaataatcatgttctgaagcgccgtcaggaagtaaaacctctgtttctgttaccccatcagcaatggcagaagcgatgaacccaacgggtttaagcgaagcgacaacggcggcatctgcggcctgtgttgcacctccccagagagcggcggataatgctgcgaaaagaagcgtttttttatgtaacataatgcgaccaataatcgtaatgaatatgagaagtgtgatattataacatttcatgactactgcaagactaaaattaacatgacaagtctggtttccctggaaaatgtctcggtttcttttggccaacgccgcgtcctctctgatgtgtcgctggaacttaaacctggaaaaattttgactttacttgggccaaatggcgcaggtaagtcgacactggtacgggtagtgctcaggctggtaacacccgatgaaggggttatcaagcgcaacggaaaactgcgcatcggctatgtaccgcagaagctgtatctcgacaccacgttgccactgaccgtaaaccgttttttacgcttacgccctggtacacataaagaagatattttgcctgcactgaaacgtgtccaggctgggcacctgattaacgcaccgatgcaaaagctctctggtggcgaaacgcagcgtgtactattagcgcgagcattgttaaatcgcccgcaattattagtgctggatgaacccactcaaggcgtggatgtaaatggccaggtggcgttatatgaccttattgaccaactgcgtcgtgaactggattgtggcgttttaatggtttctcacgatctgcatctggtgatggcaaaaaccgatgaagtgctgtgcctgaatcaccacatttgttgttccggcacaccggaagttgtttccctgcatccggagtttatttcaatgtttggtcctcgtggtgctgaacaactgggtatctatcgccatcatcataaccatcgtcacgatttacagggacgaattgttttgcgtcggggaaatgatcgctcatgattgaattattatttcccggttggttagccgggatcatgctcgcctgtgccgcgggtccgctgggttcgtttgtagtctggcgtcgtatgtcttatttcggtgatacgctggctcatgcctcattacttggcgtcgcgtttggtttgttgctggacgtgaatccattctatgcggtgattgccgttacgctgctgctggcgggcggtctggtatggctggagaagcgtccacagctggcgatcgacacgttattagggattatggcgcacagtgccctgtcgctgggcctggtggtcgtgagtctgatgtctaatattcgtgttgatttgatggcttacctgttcggtgatttgctggcagtgacgccagaagatctcatctctattgcgattggcgtggtcatcgtggtggctattttgttctggcaatggcgcaatttgctgtcaatgacgataagcccggatctggcgtttgttgatggtgtgaaattacagcgagtgaaattgttgttgatgctggtgacggcattgacgattggtgtagcgatgaaatttgtcggtgcgttgattattacttcgttgctgattattcctgctgctactgcgcgtcgctttgcccgcacgccggaacagatggctggtgtcgctgttttggtggggatggtggcagtgactggcggtttaaccttttccgcggtttacgatacgccggcgggtccgtcggtggtgctatgtgcggcactgttatttattctcagtatgatgaaaaagcaggccagctaatctatcgctgaacacatttgtcggatgcggcgcgagcgccttatccgacctacggttcggtatctctggtagtcctggtaagacgcgaacagcgtcgcatcaggcatattgccagtgccggatgcggcgcgagcgaccaatccgacttacggcatttctggcggcgttatgccaaagtgattccacgcccgcgtcgtcgccatacgcccacgcggtgtacgctgcaaaaagccttgctgaatcaaataaggttccagcacatcctcaatggtttcacgttcttcgccaatggctgccgccaggttatccagacctacaggtccaccaaagaacttatcgattaccgccagcaacaatttgcggtccatataatcgaaaccttcagcatcgacattcaacatatccagcgcctgagcagcgatatctgccgagatggtgccatcgtgcttcacttcggcgaaatcacgcactcgacgcagcagacggttggcaatgcgcggcgtaccgcgagcgcgacgagcaacttccagcgcgccgtcatcactcatctcaagccccataaagcgtgcgctgcgactgacgatatattgcagatccggcacctgataaaactccagacgttgcacaataccaaaacggtcgcgcaacggtgatgtcagcgaacctgcgcgcgtggttgcaccaatcagggtaaacggcggcaaatcaattttaatggagcgtgccgccggaccttcaccaatcatgatatccagttggtagtcttccattgccgggtacagcacttcttcaacaactggcgatagacggtggatctcatcaataaacagcacgtcatgcggttcaaggttagtgagcatcgcagccaaatcgcccgccttttccagcaccggaccagaagtcgtgcgtaaattaacgcccatttcattggcgacaatgttggcaagcgtagttttacccaaccccggaggaccaaaaatcaacaaatgatcgagggcatcgccgcgcagtttcgctgctttgatgaaaatctccatctgtgaacgaacctgcggctgaccaacatactcttccagtaatttggggcgaatggcgcgatctgctacatcttccggcaaagtggtaccggcagaaatcagacggtctgcttcaatcatcctttacctcataacgcggcgcgtagggcttcgcgaattaaagtttcactgctggcgtcagggcgagcgattttgctcaccatgcggcttgcttcttgtggtttatagcccagcgccaccagcgcggcaaccgcttcttgttcagcatcgtcggtcgccgggctggcaggagacgtgagtaccaggtcggcggctggcgtaaagagatcgccatgcaaacctttaaatcggtctttcatttcaacaatcaagcgttcggcggtttttttgccaatacccggcagtttcaccagtgcccccacttcttcacgctcaacggcattaacgaactgctgcgctgacattccggagaggatcgccagcgccaacttcgggccgacgccgttggttttgatcaactctttgaacaatgtgcgctcttgtttattgttaaaaccgtacagcagttgcgcgtcttcacgcaccacaaagtgggtgaaaacgatcgcttcctgacccgcttcagggagttcataaaaacaggtcatcggcatatgcacttcatagcctacgccgcccacttcaattaacaccagcgggggttgtttttcaatgatgatgcctctgagtctgcctatcacatgacgctcctgcgtaatgaatcaaagataatgctgtatgataaaaaaatgctggatagatatccagcgaaggatgaagaaaacttgcgaggtgtctcgatgaactgaaaaatggcacagtataatttattctacaggttatattggaagcaaatattttaatattacatattcagtgaagaaatgcgtaataaaaatatacattgcgcctcctgaaaaaataaattttttatgctattacgtatatttgtatctatttcaatggaatgacaacgtgaatattaattaccctgctgaatatgaaattggagatatcgtctttacatgtataggtgctgccttatttggtcaaatatcagctgcatcaaattgctggagtaatcacgtcgggatcattatcggtcataacggtgaagacttcctggttgcagaaagccgggttcccctttcaaccatcaccacgctatctcgttttattaaacgttcgtctaatcaacgctatgctataaagcgattagacgctgggctgacagaacgacaaaaacaacgaattgttgaacaggttccctcccggctacgcaaactttaccacaccggttttaaatacgaatcttcgcgccagttctgttcaaaatttgtttttgatatttataaagaagcgctatgtattccggtgggtgaaatagagacgtttggagaattgttaaatagcaatccgaatgcaaaactcactttctggaaattctggttcctgggttctattccgtgggagcgtaaaaccgtcacgccagccagtttgtggcatcatccgggtttggtgttgattcatgcggagggagtggaaacgcctcagccggaactgaccgaggcggtataacttaacgcagtcgccctctcgccaggttcagccgcgattcgctcatctgcatcgcattctgactaacgtggcagtgggtgatagcaatcgccagcgcatcggcggcatccgcctgtggattagcgggcagtttcagcaaggtgcggaccatatgctgcacctggcttttttcggcactgccaatacctaccaccgtttgctttacctgacgtgccgcgtattcaaatactggcaactcctgattcaccgccgccacaatcgccacgccgcgcgcctggcccagtttcagggctgagtcagcgttctttgccataaagacttgttcaatggcgaaataatcaggctggaactgggtgatgatttccgtcacgcccgcatagatgagtttcagacgagacggtaaatcatccactttggtgcggatgcatccgctacccaggtaggacagttgcctacctacctggcggatgacgccgtagccggtcacgcgcgaacccggatcaatgccgagaataatagccatcacgcgtctccgttttgctgtttagcaggcctcatcagagagtcgctgcgacctcatcagagatttcaccgttatggtaaacttcctgcacgtcgtcgcaatcttccagcatatcgatcagacgcatcagtttcggtgcggtttctgcatccatatcagctttggtagacgggatcatggaaacttccgcgctgtctgctttcagacctgccgcttccagagcgtcgcgcactttacccatttcttcccatgcagtgtagacatcaatcgcgccgtcatcataggtcacaacgtcttcagcacctgcttccagtgctgcttccatgatggtgtcttcatcgcctttctcgaaggagatcacgccttttttgctgaacagataggcaacggaaccatcagtaccgaggttaccgccacatttgctaaatgcatgacgcacttcagcaacggtacggttgcggttgtcagacagacattcaatcatgattgccgtgccgccaggaccgtaaccttcgtagatgatggtttccatgtttgcatcatcatcaccgcccacaccacgtgcaattgcgcggttcagtgtgtcacgggtcatgttgttagacagtgctttatccaccgccgcacgcagacgcgggttagcgtccggatcgccaccgcccagcttagccgcggttaccagctcacgaatgattttagtgaagattttaccgcgcttagcatcctgcgcagctttacgatgtctggtgttggcccatttactatgacctgccataaaaatatctccagatagccctgcctgttcaggcagcgttaattacaaactgttcaatcgcctgccggttgctccaggacttagtgagcgccgccgcagcaggcgcatcaagccacttgtaagccagatgttcagtgaaaacgatctgccgctcgtgcggaagcgcaagacagaaccatgattccgtattacgcgtcacgcccggcgcatagcgatgacgtaaatgtgaaaaaatttcaaactctaccgtgcgctgacagtcaattaaggtcagttgttcagcgacaacatcaatggtgacctcttcctttacttcgcgcatggcagcttgcggcgcggtttcaccctcttccacgctgccggttaccgactgccagaaatcgggatcgtcacgccgctgcaacatcagcacccgtttcgtatcttgtgcgtagatgaccactaagatcgaaacgggacgcttatacactttatccttcacgctgcctcttcgttgactgccttcgctcatcccattcacatagttatctatgctcatgggagttcactcagttgccgcctcgatgcaacgcgaatgatttcgtgtatttgagtcatatcagttattctcagccttcttcacaacctgaatgctcagctcagccagtgcagtcgggttagcaaagctcggtgcttcagtcatcagacacgctgccgccgtggttttcgggaaggcgataacgtcacggatattgtcggtgccggtcagcagcatggtcagacggtcaagaccgaatgccagacctgcgtgcggcggagtaccgtatttcagagcgtcgagcaggaagccgaatttctcgcgctgttcctcttcgttgatacccagaataccaaacaccgtctgctgcatatcaccattatggatacgtactgaaccaccgcccacttcgtaaccattgatgaccatatcgtaagcgttcgccaccgcattttccggtgcagctttcagttctgcagccgtcatatctttcggtgaggtgaacggatggtgcattgccgtcaggccgccttcaccgtcgtcttcaaacatcgggaagtcgataacccacagcggtgcccatttgctttcgtcggtcagaccaaggtctttacccactttcaggcgcagtgcacccatcgcgtcggcaacaattttcttgttgtcggcaccgaagaaaatcatatcgccatcttgcgcggcagtacgatccaggatgtcttcgatgatttctgcattaaggaacttcgctaccgggctgttgataccttccagacctttcgcgcgttcgttaactttgatgtaagccagacctttcgcgccgtagattttaacgaagttaccgtattcgtcgatctgcttacgggtcagcgatgcgccgcccggaacgcgcagagccgctacgcgacctttcggatcgttcgccggacctgcaaatacagcaaactcaacagatttcagcagatcagcaacgtcagtcagttccatcgggttacgcagatccggtttatcagaaccataacggcgttctgcttccgcaaaggtcattaccgggaaatcgcccagatccacacccttcacttccagccacagatgacgcaccagcgcttccatcacttcacgcacttgcggcgcggtcatgaaagaagtttccacatcgatctgagtaaattcaggctgacggtcagcacgcaggtcttcgtcacggaagcatttaacgatctgatagtaacggtcaaaaccggacatcatcagcagctgtttgaacaactgcggggattgcggcagtgcgtagaatttacctttgtgcacacgagaaggcaccaggtagtcacgcgcgccttccggcgtggctttggtcagcatcggagtttcgatgtcgaggaagccgtggtcatccataaaacggcgcaccaggctggtgattttagcgcgggttttcaggcgctgagccatttccggacgacgcaggtcgaggtagcggtatttcagacgcgcttcttcggtgttgacgtggttagagtcaagcggcagaacatctgcgcggttgatgatagtcagcgaggacgccagcacttcgatttcgccggtcgccatatcgcggttaatatttttttcgtcacgcgcacgtacggtgcccgtgacctgaatgcagaactcattacgcagttcagaggccagctttaacgcgtccgcacgatccggatcgaaaaatacctgcacgataccttcgcggtcgcgcatatcgatgaagatcaggctaccaagatcacgacgacggttgacccaaccacacagagtcacctgctgccccacgtgggacaaacggagctgtccacaatattctgtacgcatgagatatcccttaacttagctgccggcggatgccccctgctgcgcaggtgaccaagtcgcagcgttagctgtatgtcacaactgaatgaaaaaaggcggctattatactggaaattctgccgcaccgtaagagcctggcccgcgctggaacgcctcgttaccactttatatcgggcctgaaatcagactctacgccagtttgctataaaggtgttgcccgaactcataaaaattaacaaaatttgtcgttccgccatcggctaatcgcattaaggtgtgaggcacgattttgttttttcaggagtcattatgcttgaacttaatgctaaaaccactgcgctggtggtgatcgatttacaagaaggcatcttaccttttgccggtggtccacatactgccgatgaggtagttaatcgcgccgggaagctggcggcgaaatttcgcgccagcggtcagcccgtgtttctggtgcgcgttggctggtctgccgattacgctgaagcattaaaacagccggtcgatgcgccctcaccggctaaagtgttgcccgaaaattggtggcaacatcctgctgcattaggtgcaaccgacagcgatatcgaaatcatcaaacgtcaatggggtgcgttttacggtacggatctggagttgcaattacgccgccgaggtatcgatacaatagtgttatgtgggatctcgaccaatatcggtgttgaatccaccgcccgcaatgcctgggaacttggctttaatctggtgattgccgaagacgcctgtagtgccgccagcgccgagcagcacaataacagtatcaaccatatctacccgcgcatcgcccgtgtgcgtagcgtggaagagatcctcaacgcgttatgatttacatcggtctaccgcaatggtcgcatcctaaatgggtgcggttggggatcaccagccttgaagagtatgcccgccactttaactgcgtgacacggctattttaaaaatcactaaagatcgcccaagagcactcgctttctctagtgtattcaatgcgttaaaaaataatatcatacgtaattcggcaaagttcgtatgtgttacagtgtcccaaccatgccccaaaacgtcccgaagcagaactttttgtcccatacatgccccaaaaaatctctacgagagacaggtaatttgttcataattttacgcataaaatcgataacggctggaaatcattcaatactcgcactatcgaaagttatccagccagccgcggtacgttcttgcatacgacgtgccgcggtttctgttattccactataaaattcctaaccgaattcaaatcccccagactgctcagttcctctttcaattcacgctgacgttgataaatctcgtcattgcgatcgacctgagcctgcgccattgcagtaagcagctcatccagtttctgcatcgacagtttcacctgctggttttccgcatcgccccataccatggtttttcgcgctgtgtcagactttgatgccattactgccggataaaggcgggccagtgagtcggggccagcgttccaggtgcggccgttccattcgaacgtgaacggctgcgcttcctgttctgtgcgccatacctcaatttctcgttttttagcgtcctttgctgcttccagcatttcaggcgtaacagtgaacggggcgatttcgccccatttgccgcttttcagttcctgccagatttgctggcctgtcgtcgcggtgtcttctggcgtggctgtgtacggaagcgggtcttccattccttcaaacagcacgtcgcagtcaatcgcaccggactcggtgtagcggggactggtgatttttttaatttgcatcatgaaaccctcacaaacaaagaaaccagcccccgattataaaacgtgacatccgggcctcctgataaagcgagatatgtgccaggcagggtacttccgtagacaaatgacctggcagcggcactaaatcctgaaccgcgatactcagcttcgaagaccacctgccggagccttgatcccggcacaggttgcgtacgaagtaatgtgacatcactgctgccgctatctggcaggtatgcggcaagaaccaggctacccggttgcggagcgcgctgtgatgtagtatctcctgcacataacagttgtatcagtcggtcgcgtgaccagaatagccgcgaccatgccccgggaagtgtcgccgaagacattgattttgtaaccaatacctgatacttagccggcccctcaccagtagcgccgctgtattcggcatcgccatgaaaagttatccaccggcctgtttctgattcaataccgcctgaaccaattccgcatcgtatttctatatctacaagccccctgaaatagggttgccccccatcataagcaatgatgggattatatgaaatgccactccctccatattgtgttaccgcgtaacgcccgggggtgacttcgaacacccatttcagaaattcggcagggccatttttggcgctgaaatacaccacttccgacgaagagaacacatgcccgtatccgaacgcccccggcagcgcaacacggccttccgtgctgtcgtaaaggtctgtctgaatgtcctttaccgctgcgcttttcagctcaagctcattgcgcatggcttccactgtggcctgcgccagcagtgaccgggctttttctgacagcggagacagtgaagcattcccgtcctgattaaagcacagaaggttatctgcccgttcttccagattgctgattgcggttaacacgtcgctgagtggttgtttacccgccagcgcattcatgattgttgtcgcaaagttcgggtcattacccagcgccgctgccagctcattcagcgtgtccagggcttccggggacgagtcaaccagcgcagcaagcagtttgcggacaaacgccacgttcgccatctccagcccgacggcatcatccggtggtgttggtgtggtgggcgtgccggtgaacgccgggctgtccagcggtgcttttgttttcgtctcgtccatgacggttttgacagcctttggtgtggctgccagctcttcgctgtcgttgtccgtatcactacagagttgcaccaggcctttttctgtcgtggaagcattgcttcccttcaggtcatcaactatccgttgcgcctcgtccttatgctgtttcgcgttctgctcgctttttgctgccgcttcggcgctggcttttgcctcgccggtcagcgttgcagcttcaccgagtttatcgaccgctttcttgactatcgtgtcggcatccttgacggcctgctctgcgcgggcggcatcctgtgtggcagatgatgccagctgtgccacctgctttttatctttggcaacggcttctgcattctgctgtacgttatccgccagcgtctcgcagtcgctcttaatttgttgcgcatcagcgacgtgttgcccggcctgttgttcgctttccgctgccgcttccgcgctctgctgcgcctgcgccaccatttcctcaaagcgcttcaccacgtcgggtttgaggtcgccttcatcaagggcagtcagaaagtcgttcagcgtaccgggcctggagtcgtcgtatacagcaatgtcgccaacacagtactcgtcgcgccagtcctgcttcagatatacgcaatattttccggtttgcgccttaaaacagtactcgccacagtttcctgtcaccacgtcggcaactgtgcgcatcaccacttctgaggtgtttacccgggatttcagaattatgtggcatccggacatggggatgcctgcgccatctatcagcgcacctgatatcactacagacatagtttttctcgcgataaattaaatcaggaagaggcttccggagagacgggccattcaatggcgttatatgaggttttatcagtgataatgttgaaatccatcgcctgcagcgatttcgcgtaaatgcggtacgctttcagtttctccctgtcttcgtcactgattaatcccagcagcaggtctttttcccattcgctggtcatgatgctggcctgttttaacagtgcatcacgctcatcttccgctttaagtttgtagtcaaaaacaaattcatcattgcggtagaaccagtaaccaggcgcggtaatacggcgattggcggtaatatccggaacttcaataacactggcgttacggggttcaatgcctgtcacatccttaccgacccacaccacgcgcccgtccccggagtaaaccatttttattgtgtcactggcaaagttcttctgttcttcataccagtttttgccgtcttccgaaaaaagccaggtgacaccatattgttttgtcagttgatattgttccgcggttttcggattacccgcagtaatattttttaaatgtaacattgttaaacactcgccacgttataccaggtgccattaatcagtttctgaagcggacggtaatacacgccgccgatgttatctgccgaattacttccggtttcctgcacattaataccggataacccgtggcctgaaggtgagcgaaatgtccaggatacctggttacctcccgggttgtaatacatttcggaaccataacgcacatcctgcacgccgccatttcgctgctgatagcgggcatcaaagtttccgtagtttgatggaaccatctgcccgtttacggcaaacgttatgctgttatccgtattcctctgactgtaaaaatgccagccagaatcatcaccaagctctgcaacaacaggccttgaggaatttccccatagattaaatcttgcactcttcgtggaagaactgtcacacgacagcgtgaactttcttaaattgccggtcgagagattttctaatgccagcacaccgttttttgtaaaacgaaaggcgttgtgtccctctgcaaacacattaataacaccgcgtccgccccacttaaaaccggtattgctatcacagagcgtgagtgatttttcacccagattgttctcattaccgatgccaatcctgtcaccaataaccacatcgccctggcgcaggttaatggaaatgggccgcagtgggccaatatcgccattctcgccctgaccttcactggtagggataaggtgcaggcactcttccgagcgacgaaaaatcagaccaaaggcttcgttgaaaatcctcagcgcattaacaccacggattttcagttccccggtcatggtgtcaccatcacgctgaacggcattttttgccttatccaccgtaggttttaatccgaggttttcaacagcctcatccttatcttccacatccgaaaggttattttttatcagcaatgcctcttcgttaatcgcaccgcccaccagtaataatatggctttatatagctgatcgtgttcttctttattcagttctatcccggctttctcaatgacaccacagatttcctcctgaatggcatcccacatggcactgttcagccaggtggcaaggcgtcctgtgcgaagatttccgtcagtaaatccgttcttgcccgggccaaacttatcttttaccgctgtcagcgtatcaatcctgtgcatcttcatcctcatctggataggaaaataaaacgacagtatgtgacggacataatttattaatcacgcactccgcaaccgtatccccccacgtccggatcggtgtgttgcaggcgtccgtgcatgtctgccactgagcaccggcatccaccggcaacgtcacacgccagaaataacgccagcgatccccccattccggatcggggcttgcatccagattctggaactgttcgatcgtcacgccggtatatcccagcgcctcaagctgatccaggaaaaactgctcatttatgccgccagctacattggcttttgcttcaagacgttgctggcgctggcgtaatgtctgggttccgacaggagaacaggaatcaggtaaaccatacaatttttcataacgttcaatcagctctgtggactgaccgggatcgatttcaatcaccagttcatcagcccgctggtgaacacgcacaagcgatggagccagaccgtcaagtacaccgtcggtatctgaccatgcaggtcccggcggcatcaggccatacaacaattttgtataatcatcctgtaacgtatccattatttactccttaccgggtcataagcctgccatgtgatctccccgagtaccggaagctcagtttcccccaggtcaatatccgatgaagggtcgatgagtcgatgggccacctcgcctgcagataaactgatagcctcgctgattctggacagatacatgcgcccttccggcacaccatcccggaacatcagcgcattcagttctgattttattgccgccctgatttgcggtgtgtctttcgataacgcaatcgtcatcgggataactttttctgtggcaccgaatacatacaatccgcttccggcaacaggtgccagaggaaggatgtggtccctgactgcgttaatcacgctttcatccggggccgggtgttcaggatcgttcgtcgccaccatcacgccaaccgttccaatacctttccagtgtctgaaagtccatgcacggttaataccctgaacttctttcgcccagataacataatcaggatctgcgcccccctgtggaatgtagtaataacgttccataacgcgggcacgccatatttccagattttcaatatcttcaccgtctgtaatggtgtcagcgtatcctgtggacggcagaccactgacgggtgttcccagctgcatggcaataccatcatccgtattccccgccgatcccggttcgtctgccacaacaggcacccggagaagaccatcggctgcggtcaccgtcgccgtcgtggtgaaggtcacctgatcatcacgctggatctgcgttcccgctggcaataccggcgtcccctctacgccatcccagcgcacaaatccccgggctgccaccgcatcttttcgcgggcagcgtttgattctggcgtgccggtacaaccagtcttcatcacacatgtccggcaacagatttctggcaagataatcgatatacccgtacaacgtgtgtacggctgcagcctgtacacgggcatacacttccgcatccatacgacgaagcagcgtatcctgctcaaagcgggttaataaatcgctccggatcatagaaataagttgcggaaggccggggcgataaaactgactgtcagccattcagttcactccagatatcatcaaaaataatgttgtgaatattgccgtcacgctggtaaatggtaatggcaagtgccagcgagtctgtcccggtccggacagcgttaatatcaagacgggaagcaacaccatcctccaccatccacgccagcgcctcacgggcataatctctggcaagctgcggggttttatttgtcagcttgctgcgtcgcaacagatacagacgcgaccccgtgcgatcattctgaaccgcaggccaggtatctccccaccatccaaatatctgcggtgcatcatcatcccgcccggcacgccgccaggtaaaaagcgaaataatcacagcacgcgtcagaaggtcgagcgaagccccggtcgacacggatcgcccgttaacattaatcatcatgattttcagcccatcggttgatctggcgtgtcagtgatcccaccaccatcaccattttcggtgtgtttgtgggcattgtaggtctgccgcatttgctgcatgctgagtccgccactgtcgcaattgtcagtaatatcagcggtggattcgacaggcatttcaaagcgcgctttaggcgcgttttgaaaaataatgggcttcccgcccccgttcaccacaataccggaacgagtcaggacaacggattgcccctgatcgtcataaagcgccacttccccacgtttcagtcctttcaaccggtaacgtctgtcagccacgaccacaaccacaccatgagaacgatcgcccgccgggaataaagcaacgccctcagcaccgttatgtgcagcagatgtaaaaccataaggctcaaggtgctcaacgtgttgtttctgatctccggctatcattttcaaccctacagactgacactttctggctgaatccaccgccgtgatgacagcccgggaaatcagattgcgaagagaaaacccgttcatcagaaatcctcctcaacatttttttcttcctgccggtaacaggctcggggagataagcatctgccgggccaacccgtaattcagtcgtcgtgccccggtcgtcctggttataggtgacttctgcgatcaccagttcatcattatcaaaattattcagcgggtcgaaaacgatgacagataaccccggacgccataacgcgccactgccctgccgccagccctgaaccgtatatgttgtctcacgggtaagcgcagcccgttgacgcgcttcaaattcacaacgggccttacaggttgctgtcgttgctgtgcctgactgctgaatcaacaaagggcgataacgggtcacaccactgtcctgaatggtctgacgtattgcggcaatggtggcctcaccaaaatcatcatcgttgcccgggcgctgcccactgacctgatattcagaaaaccgctctctgatgcttctttccgtatcacaggaaagaatattctctcccagcaccagtgctgtcgccgctttgcctgttccggttttccccagaaccagtcgaccgcattcatcgtcataagccagcgtctgaacctgccccagcaaccggttaagacaatcggcaacggtttcgccgtgttccggctgggcatcaatcaccgctgtctgcggcacaccggcgtcaacaacggtgatgccaaatggcgcagccagttcactgacgattctgagcaggttttttccgctctgctggactggcaaagcagagcagtcaaccagatcggctgttttgcttcgcccgacaattcccatgctgacgctgctggcgtcataacgaagcggtagagcctccacatatccggtgagcacgggctcatccccgataagcacttcaaccagctcaccattttttatccggggctgataatcccggcttccgggccagcgggtggtaatggcaacattaaaatcccgggcaatacggttaatgcccgcactgattcggacggatgtccagccgccccattcgcgaccagaaacccgaagtaaaacggtattattcatctgacgggtacccttaatgccctgatcggaacaaagcccggatgggagatggcatttcgatccaggatatcagtttcacgggacgcatcgtcgtaccatgacgcagccagaacaagcgcaggaagaacctccgctggcgttcgctctgcggtctcctccgtctgaaccagacgggcctgaatatcccggttcagttctgtacgtaatgacgtcagctgaaaaaacagcctgtcatccgccgcacgcctgagctcctgttcaatcgccgcgttcagcgattcgcgtatgatggtgagattttcccgcgtgggtggttgcgcggtctcatcctgctctgtgctggctgccacgctgtcaagcgccggatgagaaacatgaatgatatcggactgacgttcagtggaaccaccaacagccacaaccgcctgctgatttttcaccagacttccgggttgcggcagtgaagtgaccgcccttgcagcctcgctgattgccgtcgtccggatgactgcagccaccagatttgtctgctgtttttgcctgacaaccgatgcggaatctgtgggccacacagcacgcggtgccagtcctggatccagcgtaatacctgacattgtcgttatggactgcaccagatcctgtgtgttacccaccagtctggttcctgcccgccaggtatcctgcaacgtatgcacaaaatcactggcaaccgacggcggcatcagaatgacggataaatcgccctgcagtagtctcgctccggcagaaacagccgaattaaccattttgaaagctgtctgaacggttcccagcatatcggttgcccgggcaataacatcgttctgaataaagtccgatattcccgcgagatcaaaatcgccgaacatgtcttcaatcagctcatccaggaatccggacgactcctccagttttctggcggttgcggctccggcgaccgggaatgacagttccccgctctcaacaaactgaaatgaaacccggcacatacggccttccgtgctggaatgagaaacggtcacctgtccgtcaatacaaccctgcatttcaccgaactgcggatggatcagtgtccccggcccggcggtttcaatcgcggtaatcagcctgtcgcgctgctctgcgtaatcatcaccaacgagatacgcattaatcgtcagccgtcgcgtggcacgcccgagatcttccgtgtacggtttgtcacggtttgggtattcatggacctgaacgcggcgtccgaacgaaccctcgtcgctttccaccgaaaacggaacgccacgaaatgaagcatcgtaaagattatcgcgccaattgatacctgaagatgcagaaaggagtgaagaaagagaaggtaaagaaggtaagtccatactgtctccactataaaaaaaccgccaatttctggcggcttatatattaatcatcactaatatctttcatattcaatttgcaattttcgtaggtcactccagactcgccattaacattaactccagctctgatattcccgttttcttttacatctacaaaaaactggcctcttggcatcttgaacacaaatgtaaaaccaacggtatctgaatcaaaatcatcatctttatatattgggatcagatgtgtcatcgtcgctggtgatgcattgtttgcaaaatcaaatacacctatacttttgccgaattcataagaagcttttctcaatataatcgcaccgctggcagaaggggatgggcacgatatcctcagttgtctgaatccatctgtatccaagtcaacatcattatatgcagatgctttaacgttattaacaaatcgtgaagcaatctccgcatttgttagtgttttcgcctgagcacagcaagaggttaatattgcaactgtcattaaaaatggctttatcacaaaacaaactccattgttagcatgttacgcgataattttgcctcatctctcaccacaaaaaaagaattcaccttttaaatggagaatacccaacgtcatgggtgattttcataaagggatcgcctgttttcggcaaatcgatgacacgcattcccggcggcgcgttgtcaaacgtcaccttaagttcgctgcgggttgccggtgacgatgaaaggcttaacagttgattcctttccagtgatacattcgggatgtagcgtttatctggagataaatacccatcaccacgtggcatctgccatccggtcatgtcatagacaaaatcatggaactgtttgccccactcgtcgaacttatcattcagaccaaatccactattcagtgcatcagccacaaaatttttaacaagccagggatgttctttttcaaactcctgcgccatcatgcccagttcaagcaatccaccaatcagactgatcttaccaagcccctttaatttcagcgccgtttttcctgccgccgttgtccattgattctgggcgactgttgctgcacgaatggctgccaccgctttcacaccaatatacagggcagaaaccgttgctattgtttttactgcctgttcccatccccccattgccctgacaacctgatcaacctcctgccagacttttttcacaaccggcccgaccgtttcccagttgtcaataatgagatacgcccccgctaccagtaacgtaatgagtccctttgccggtgtcatattcatcacgctacccatgatttttgttatgcgtgtcaatgtgccaatcgccacgcccatcgtcagtaatgccgcaccagttttcgcgatggtttttacgacatcaggattttctctgacaaacgtgcgcacttcttccagaaaaggcttcatctcttttatgccttcattgattgaaggcaggaaggtttcccccaacgtggaagaaatcgcattgatctggttctgcagcagcaacaactgattttccgtcgtcgcggcacgggcggcatattctttctgcattgagccgccatactgctgcgcatccgccacacgattaaaattggttcgcaacaaatccagattcgtgagcagcggcgcaatggctcccagagactccttcccgaacagcgcattaagcacagcagcctgtttttctttcggcactttcgccagagaatccagtacgtgcagcatggccccacgggcgtctttctgcatatccgccgccagttttttcgggtcaatgcgcaacaggcgaagcgcttttttctgcgatttggtggcagaattccccgctgtcagcgacagcataaaattctttatccccgtcgctgcaatttctgattccacccccattccggcaatggttgcccccattgcggcaatctctccggaggccacacccgcaacactgcctaaagggccaatacgggtcacaacatcagaaatctttttcgcacttgcaggaccagtattgccaagatagttaatcttgtccgcaagtcctgccacttctccctgtgtcagcttaaaggctgtgcgccactgtgccatcatctgaccggattcttccgccgtggtgtcaaaggccacccccatcttcacggcgtcgtcagtaaactgcatcagctcgtcacgggcgatgccagcctgaccacccgccgccacgatttcggcgataccttccgccgacatgggcagttctgttgacaggtcgcgcacctgttccgtcattgccttaaacgcttccggcgtatccagaccatccaccactttccggacatccgccatttttgattcaagggcaatggcagatttgaccgggagcgccagcgcccccagtactgcggttccggcacccgctgcgcccagagacaggctggcaaactcctttttaaagcctttcagctggcgctgcatccccttcagcggtgccgacaccttatccacggcagtgatgatcgccttcagctgaaaactgtcagccatgcttcatctcctcgttaatgcggacggcctcggcttccagttctgtaaactgcgaaatagccacccgtcgcagctccagtggattcagtttccagaaccaggcaacattgtagagtcgtttccggaggtgcttcccgtctccgactgggtaaaaaaacgcaggatctgcatgctggtcttaaaaatatccagttttgccatctgcgccgccgatgaacgcgggatccccgccagcagcgggatatatttcagtgccacctggctgtccagtttaatactgccctcaccggaaataatgaaaggaaaacccagggcctcgatttcgtcatacgtgggttcacgcaactccagcacatgcagcgtttcgttatgcgctgtcaccggtttttttaaaacaatttctgtcacgctcattactgatatcctccctcttcgccgtggaattcaagatctgccgtaccttcttcggcattatggtttgcttcgccatgcagccaggccgccgaaagcacatacaccatgccgtttgccagctcggcagtaatcgtcatctggtctgaggcggtaattttgtcgaccggaaaatttttgggcactttaaacgtgcccttaacgtaaggtgaccgccaggtctccttgtaatccacatcaccagccatgccgacgacatcatcccggacattggtgttcatcggcacttcaatgccacctgtcagcgataactgctgaccatccactttaaaaaaacaggttccggcgatctttgccattatgctgactcctctgaatactggagacggaactggttaaccaccgcaaagacacgtaactggttaacataatccggcgggaacagcgtgttcagtcggttcgggttatccgcatcacgctcaactatcagatactgtttaaacagatcgtaattttccacaataccggcacgctccatctgacgatatgtcgccagaagctcccctttgataacggcaggagtaacaatcgcctgcccaggaccaaaacgggtaccatcatttgccagcttgtggcgtccgtacttgcttgtgatgaccgatttcagtttgcgaagaacatatgcgctggtatgcagtgtttcactgtccagatagctgttgtctgccacgccatatgcattctttttgtatgtggttacggaacgctggatccgcaacgtgccgccttccacataagccgtcgccacgccgtgagataaaagggtctgctgctctgtcatgatgaatcgcttacctttcggtgccggaagcatccccaccagttcccccgtctgtgtcggacgggccgggtcattgcggataaataccgcttcacgggcaaggcgactggcaaccagttcatcgacaggcgactgggtttctttttcgtaaccggcaagcgtgatatgttgctgattatgcatatctccggcattaaccagctctgacagcgttcccagttttgcggtatagacatgcccgtataactggcgcgcataactccagcgaccgctgctgtcattcatttcggtcatcatcatattgatggaggcggcatcgttgaacggcagaccgataaagtcgaatgcctcatcgcccatagcagcaacagcggcggtaagatcaggcgcgccgctacccgcagttccggcttccgtcacgacctgaagccccgcaggcagaatctcaccaccaccagaaccataataattcaggcagacaggcaactcgttaccatacagccccttatggcgggcagtcagcgtcaccacacctgcatcagatgacgccgcaaacggcagggtgataaccccgtttaccgcttccttaatcgcggtggcaaccgcagtggcatcatcgccattcaccacaggcacctgtacactggagcgcccgacatacagactcagggtgccgctttcctctgcttctccggtaactgtcaccctgaccgtcgccgccgcccctctggcttccggtactgcaataacatacagttcaccgaaaggatctgtctgacggtagacgtcaaccatacgcgccagctggctcccggccccacaaatctgacgggcataatctgctgacggcatcagcaccaggctgttaacctcaatggcggcatcgttgctggcatgcccgatcaataatgcaggcgcgctggtcactgctgtatttgcagcagaattgtccatctcggcgtaaaacaacggcaccagcgtatccgacggaacagcactaaaacttattgtcatgattctttagccttatcctgtttaacacgtaccacatcacccgccgctatacggcgaagccagtagctgttttcttccacatttcgcccgtcagaaggcaaaaggtctccacgggcagggtcaggaaccgaccgccctttcaggggtttcacaaacatgagggactcttatttctgagggaaacgcatttccagatggtgctcaaagtcaccatctgggccagtaccaggatcaatgtaatccacatcaatactcagcaggataaatccggcagagcattcacgtcctctgcctgtcgcgtgtcttcttccgtgatttcatacttcgccgtaaaatcaaactggtaatacagttcgtaacggttcagatccagcagcgtgccaccggcataaacaatctcgcccccctgcgggtccggcatccacccaagcagggctttccagagttctctacgacatcatgaacggcgtcataggctgcccactgccctttttcatcacgctcattgctgagcacaacaataacggagaagccttctgtcaaatcctgccagtaatcggtctgtgatttttgttcccccggcgcatcgtcagaggggacaacataggcagcaggcagacgcagttttccggcatcagggatcgccttaaactgcgctgcaccaccaacacgattctcaaaacgcgggcatcgctcacgcaacgccgcaattattgttgtcagtttcatttatgcttcctttttaccggacgtaacgaacactgcaactcacgggacaacagttcctgcgtccagtgacgccgccgctcaataacgtcagccataaagttattacgcggggccagccggaaagccgaagaatggtgcttcttctgccgcttatcctttttatccattccataagctgaatggcgaacgccgtaatacagaaatgccggataatagggtgcgccttcagggaaacggcgattcccctgcccgtttttctggttaggagaaattttcaccatcagtccggggcgacgcgtcgtttttttgggaacgtaataaccgatggagcgggccagacgcccggtctgatatcccgggttctctcccggaccggatcgtccgcgtttaatcaccagacgtcttgcgtcgcgcatatagacgcgcccgatctgcacaaatgcccgacgcagacgggcgcgattaaactccagctcctttggttgtttaaagtcgacgtgtaaaaatgctgtctgattcatggcattcaccccgtcgtcgcgctgtacgcagttcttcacattccagcaataaaaaacgccgctgaccgttcaggtcgcgtattcgccggatccggtactcctgaccgtaataaaccacctcatgatctgccgtgatgtcgtgacggaaacggatcgtaaaataatgcgtaacgatattttctgtctgcactgagccctgataagcggcagcgcctggctgagccacctttgcccagacatcaaacgactccgtatatgtcggctccgtaccaaaatcagcggtgggttcatccacccgaaggcggatctttattcggcgattcagctctccgggatccggtaaaaggtaagtggcactggtctgactttgtctgattttcatagcgggacaatcctgtaagggccagcaagccatctgaaactcattggcgtttccagcttctccacatcggtgatcgttgagcgattttcataaaaatgactgaccagcatcagcattgccagacgaacatcatcagtcagatgcatcccgtcaggatcgtcttccggaatcgtctcttccggtgcatacaacttcctgttcaggtatgtctctgttcttttctgtaccgcctgtgccagcagtttcagaaaatcgccgtcactgtacaaaccatcatcgagccggaggtgagatttaatttcctcttctttcaggagcatattttcctcctgtgcccgcaattacgcgggcacaaaaaaaaccgcattacgcagcggctttctggcgggttgcagccccaattttcatcagcttaatcgcctgagaatccaccagcataccgccggttcgcttggtggtataaaaacccacaaacggtttattggtgtacggatcgcgcaggatacgggtaccgatgcgatcaacgatggtatagccacgtttgaagttaccaaacgcaatggcttttgcatcggcagcaatatccggcatctgttcattctcaacgatgccataccctgccagagaagaaggctgacccagctcaatacccggacgccacagataatttccgtcgttatccttcagcagacgaatggcaaacaggctgctgttgttcatcatgaacttcgcgccgctgcgatgcgccttgcgcagggtgtaaatcagtttaatgatcgcatcggcagtcacgccggaagccgcaccggaagcaatgtgctgaagtttgccaaacgcacgggtcttgtcatcttcatcggtggactcataagccagaaaaccttttggttttttgctgccgtcgccactggtaaaggcaatttcttcctgttcggcaaattccagcgccagctcactgttgatccagtcttccacattgaagaaagcatcatcgagcattttctgggtggcctgcgggttgccgtagatttcccccataaagggttcaatcagccccagttttgaggtggcggtttccgaacgtgcatccgtttcccccacccatccggacgttgtgccgcccagattcaccagttttttataatccgagccaccgagggtgatcacggtggcttcctggcgcatcaccacctcatctttcagcagcgtcagaatggtgcgatccagttcttccggaatggcataaccaccatcttcatcattgcccacctgcagcgccttacgctcaagctcacgcagaccgtcttcacgccccttgcgcataaatccgataaacgcttctttatgttcactggcaactttattttgcgtgccgcctgccggacgcttaacttcagccagctcagcctcaagatcacttttcaggttttccagttcagtcagtttttcattgaggttttccacttctccggcaagttttcccttttcctgctcgatcgcgtcgatacgtttgtcgttttttgccttaaaatcgtcaaacttctgctgcaaatcctgcgcgacctgttccacgtctttaatatcaacagccattatttactcctgattaaaatttaagatttttcagtgcattcagtgcggcatccacatcctcagcatcacgcagggataaagcgccataccccccggccatgaatgctttggcctgggttcgcgagagtccaacatcgcgcaggacccgctcaataattttctgttcagggatctccccacgtgccagcgcatttttcacatcactgatacgtgcctcatcattggaaggaaacgtcaccagactgacctcccacaggtcgatctctttcagcaggaatacccctttttcacggtcgtattcccagtctttcaggatgtagccaatagaaaggccggttaaagaaccggccttcatatgggcatgtgcacgttttgccaggggatcatcatcaacgagtaatcgccccctgacataaagcccgacatcatcttctttcatttcggtgtacacaccgatgggctcatccatgcggtgctgccagagcaacgcaggcagcgcctttttttcgctccatttatggagtgttgtggtaaaggctccggggaccaccacatcatcgtggctgtccttaacaccaaaaacagaaccgtaaccttcaaactccccggaatcactgacggatttcaggttcagcggtatatcaagacgctgttttgtctgcatctccactctcctttttcttaccgttgtcatcgccagcagagggactggtggtcatgttcatcggagtcagatacacatcaccgcccggtcggggattcatatcttccagatcacggcagtcattaggggaataaatcccccagttgatccccgtggcatacgcttcaaagcgggatttcatgtcgccacgcaacaatgctccggcattaaatttggcgtaaaacttcccctgcttgctatccctgaccagccctgtattgatccgctgttcaatgcgggtcagatacggcacaagggaatagttaatgaagccaagccccagctcttcaatattgttgaaggtggcgcgatcggtgttctgcaccatatgcagcggcacgcggaacaggcgacagatttcttccagctgaaacttgcgggtttccaggaactggctgtcctcggcattcagtgccaccgttttccagtccagccccatttccagaatcatcggacgatgagagtttcccagcccgacatgccgttcctcaaaatcctttttgatacgcgcataagcctggtcagaaagttgttgatccgtacgcaacacaccggatgttaccgcgccattgccaaacaatctggcaccatgctcctcggttgccgctgccagtgaaatggcctcgcgcgcatatgcaatgggattcagaccgacaagtccatccagcgtcagggtacgcacatgccagatttcattctgggtcagcacatccacggaaccatccggaaacgtcacctgataaaccggctgccactggctgttcagcttcggttccacacagcccggatctatcggaagaagctccaccacttcccccagtgcctttaccttgtaggcgtaaaaattaccccgcagacacaggcagacgataaccagttcccagaattcctgcggcgtcatgtagccattgggttttgccgaaatcagcttatgcagccgttcatccaccgcccgtgttttaagggtgccgctgattttgtagagactgcagggcagcataccaacagactcagccagcaccctgacgcaggaatagaccgccgtcagccgcatggcccgctggctgctgatccgctttccggtataggtgtcgtatgacaaccccagctcttccgcaagcatcccgggcgttgtgacgggggtgttatttttgcgttgaaaaagcccctggaaaaacattactcacctccggaggcgacccggtgaccgcgatcgagataacgcgcaaccagccacgaccagcacagacacagcgccccggcaacaacaaaaccagccgggggataaatcagccaggcgccatacgccagcaaaagcgcccccagcacgcccaccagtggcgtgagaattatcagaaacataatgacctcggttaaagcgagcgaataccaacgctgaccagatgctcagacagatccggctccggttcaccgccattgaccagcatccggctcattgctgtaaacatcgccacagggccgtcgattttggcttccggcgtggatttattcgggaagatattgttgtttttgtccggtttcaccgtaacgttagacatcatccagttcatgaccgggtgattgctgtggtggaaacgtccggcatagaccagtgattccgtttccttcatggcctctgacagattgcggaccgtctgcggaacttccaccagcggtataccttcttcagccagcgccagactgaactgcattgcgctccacgggtcaaatcccagttccctcaggttttcaccgccaatccattccagcaggtcactttttatctgagtatgatcgataacatcaccatccgtcaggatgagcttatccatctccgcccacttccggtaaagttctgcctgctgccgtgagcatcgttccagccgtccttccggaagccagaatttaaaatcggcatgaacatgcccgttatccgttcgccagagttttgccgccgcacagatatcaatcttatgagcaaggtcgacgccgacccacatgggatatgttttcagctcatgctgtggagcgatgtattcacacttctcccacttaatcatatccatccaggcagactcggcagtgacccacacattcatgtgtttggtaaaaaaattcacccgcgctgaaacctgttccttcgcttttttcgccagacgacgcagatcatcccagcgtttacagatgcccaggcccggattcgctttctgccagaccgtttcatcaaacggatcatctccctcatcgagcgtgtaaataatcgcaaagtaggagtcgtcttttaccgcgccctccacgtcgctgttatagcctcgcaataccttgatggcgtaatcgcgttgctcgtaacaaatcccttccttgttaaagcccgccgtggtgataccaaataacagggactgcagacgggcaccggttgccgtttccagaacgtcccacacgtcgcgggttttatgtgcatgcagctcatcaataatggcgcagtggatgttcagaccgtccaggttgtttgcatccgaggaaagcggttcaaattttgatgcgctctgctcctggtaaatcgccagcttgttgaaatcaaacaaccgcccgagtgtcgaccgggctttcctgaccatatttttggcgtcttcaaacacaattctggcctggtcacgcgtggttgcggctgaatacacctcagcaccgccttcaccatctgcccccgtcatatacaggccgatacccgatgacagggttgattttgcgtttttacgggcgacttcgttgtacgccgtccggaaccggcgcaccatcaccggacgtccgctgccatcgctgcgcatgacaacttccccggtctcttcattgaccagcggaatgacaaaaccaaaaatattaatgaggataaatacatgccagtccatcagttcaatgggctggcctgccagcgccccttttacatggggcacaaatttgtagaaattcaggatgtgctgcgcacggggttcactgaaataaatcccccgctcttcgccgtacttcagatcatcaagaaaacgctggcaggccagacggacaaattcgccagcgacaatttctcctgcaacaacacgttcggcgtagcggatcccgtcagccacttttgccatcagtctctcgcttttaaaagttccgccagcggatcaacatcatccggtccggcggtatttactttcgcccggcttgccggtgacataccaaactctgcaagcatcgcccggatccgcttccaggcatccgctttcatcgcagcagccgggtgtgccttaatcagcacatcaccgttctgcgtttccgtgcggtaggtataaccctcagcatcaagtgtttcgcagtgatgccggtattcggtgtaggcttccaccagtaactcgagtgcacgcgcatcaagctgagaaatgatcccttccgcattcagttcttccgccattcgcctgaaccagtacttcccctgcgcccctaaatgttgcggaattttagggagacctttttcatcctttttagcggcttttttggggtctttaacggggcgctttgaggggttgcctcgtatcaaatgcaggcgtggcggggttttcgggggtcctgacataatcggttttacctatcaatcgtttgatcgcattcccaaaaaaagttttcgaacctgcggcgatgcgaggaagggttggcgggcggtcccggacagccagggttgcagggatttgacccgcccctccccacaagtgagaataattatcacctgattcgttcgcgcgctgttttcgctttgtggcagggccagcacagactctgcaggttgctgtctgcgtctgttccgccatgcgctttcgggatgatgtggtcgacggttttcgcctcgctcaccacaccgacacgcagacacaactgacacagacctttatcgcgcttcagaatacgggcacgaatcaccgtccattttgagccatagccacgctgatggcggctcagtccgcgctggtgctgcacccagccttcaccccgatgtttatcgcagtagccagaactgtctgtcgttgtgcctgcgcagcctcgcttacggcatgcgcgggggattcgtgatggcatggaatttcattctccaccgattaaaacgtttctctctcggggataacgtgtattgcattcagtcccgccgccacagcgtgctgattatgttcactgaccaactgcattgtttcatcaagcaattcacggcagcgatttgcattcgtttctatgctaagcaccagtgaatggctcccacacaaccgcccatccaataaaaatggagagtcagcagaaacaatttccgattttattttttgcagcgcgcaaagattttcttcaatacgctttcgcagaacaacgcagcgtccaatcgcttcatagtttcgctcagacatttcgcctcctgttttcaatggagatattcaggccaacagcattatcgcagcccctcacactgaagggctgctgtaatgctggtatcaattctgcgtacactgtcggataccatcgacaatttcacagacctgagaagcagcgtcaaaaagccggctcgccttatttaagctgacacagcccaccaataaaaaaggcaccagtatcgctaccagcgcccatttcgccgccgctagcggcattctgtgtgtccagtgctttcggctcataattttgcaattcacttgacacaatccccgctgaactaaacgcaaaaaggagtgttcatgactaaagagcaactggaagtaattgtcgccttaatcagcagccagcaaatggctctgactcacctctcactaaaagtcgcaagcctcaccggctgcgacaagcaggagctagccaattcattccttcaggagggtgaacgcctgctaaccagacacaatggcaagctcgccaatgttattttcagccagattgccaggggtattgaggcaggcgaggaacaatcacaagagaacatcagaggagagattaacggactacttcattaaatattgccataatctctgactgaatttgctcaaaaaatgacaattcggtttttgtgccagccgctgcatttgccgatgctgcggctttttgtttattttttttcaaaacattctcctgcagaataaaagctgtcatcgtttcaactgaaagtgaggcccgtctttcagtgttttcccagtccccgccccattcgatggcagttcccagctctgcggcagcctgcttaaatgcctgtgcgattttctcgtacagaggccagtcccatgacacctggctaccaacataagccacaacatccaccgcatcaccggtcaggtgacggctgttcatggtctggcttttcccttccgcgaccagttgtttctggcgctctttcgtgcgcagaccttccgtaataccgaaatcaacctccgtcagttcaagggcgcggcgaacgacagcaaccagttgtggtttgacgccctccagatttttttcactgcggcggctgaatctgaatttacccgacatattcacctcaacaatggaaagatttttgtgacattcccgcgtgcacgtatcaccagcacgcagaacagcagattaaaaaacacttccagccagcccgttgctaacgggcgaccacacagatagctgaggggcgcaaaggcatacagcagcatcagcaaccaggccagccatgacatcagcggtttatgtctggaatcacgacgacgataaaaaaagagcgtcagcacgataaccgcgcataacgccacattcagcaatccggaaaggttacttaacattgccgcctcctccaccccgcaggcgggagaacaggccggacaccagcgatgcaatatcctgctggtggatgaacgagagaatcttcaccgacaccaccgccaccagcaccgcacacagtgcatccgccgatgtaccgtcataacctgtttttgatgcaatccaggctgacagcacatgcgcacccagcacgccaacgataaacgacaccagaaaatgcgccgccacacgccaggctgaaagcgcctgcggcatcgttgccacaaataacgccccggcgaacgccccaaacacaatcccgaaatccgttccggtaaacagcccgaataccgtcgccccgccgagcgccgcagccgtaccggaaccggacaagggttcagacatactttttctcctgtaaataaaaaagggccaccagcggcccgtaaaaaacacccgtcaaaggcacccgcagataccttttgtgtggtgttattcagatttacgcagtaaaggccagagtacggccagcgccatcgccaccagcacaccatctgccagcaccgacatcagccgtccggtgaaatccaccgccactaccagaaacagcaggatggcagccagcacaaggcgcgcacttttcacaggtactgctccagcggcaactgcagcgcctgagcaattttcttgagctgcgcttcttcatccggaccaatgccgtcctggtcagcaatatcgagacacaggcacagcacatcaaccgcttcggcggttcctgccacatcagccagttcacgcaaagcctgagcattcgcactacgaggtgacgcttcataacgggcgcggatatttgcactcatttgtgcaatctcaccggagaacggcgcaaaggcaggaagtgctgcaatggttttttccagtacagcgatttctttcgcatcacaggtgccgtcggcgaatgctatggaatacgcgccccagacggtcgcctccactgcgtcgcggttctccatcttcttcacttcagtaatggccttgcgggttttctttttgaaaataccaaacatcgtgacttttccttttagtgggtgagcctgcgcccgggggtgaccagtccacagagaaagtcacactgaccatcccgtaagctcacccctgaaaggctctgtggtttttttgatgtgcgccgggcgtggcgcggaaataaaaaaggcccgccgtagcgagccgcataaatactgaattctgaataaaaaaaaccgcctggcgtggcggtctatggcataaaatggcatgaagagaacgcgatgattttattatgaccagagacgtcgggtgcctcccgaaacatccagtcctgcatggatgctgtggtttcccgcaaaaccgactctttcaaccaccctcgcactgaggaacgtctctggggtgttatttacaacaccggaatgatacattaccagccctgccaggaaatacaaatctccaccagtaatgcaccattccactattgtaaaaaaacagcactggtaccgtaataaataatattcattacagaacaggatgtggtaaggagttagggtaaaacatcccacacatataatgtgtcagtgcctgaaacagcctggcatcgtcctctgctggagcgggtagcgggaatcgaacccgcatcatcagcttggaaggctgaggtaatagccattatacgatacccgcatatggtgccgactaccggaatcgaactggtgacctactgattacaagtcagttgctctacctactgagctaagtcggcaatggttcctcaagaaaaataaaatgccccagcaataccccctcggaaccgggtgcgaatattaacgagataagatattttttcaacaaaaatcaatgtcaatatttgtaaatatactcatatatttttattatttcaataattaataaataacagaaagcgtgtttaaagattattttctattacagttacagtttgattaaatctctctttttccagttccacaccaattgcccgacgccccagcgtcattgcggctttaattgtggagcctgaccccataaagaagtcgacaaccaagtctcccggacgactgctggcggtaattatctgacgtaacatatccgctggtttttcacagggatgtttgcccggataatactgcacaggcttgtacgtccagacatcggtataaggaacagcagccgatacggaaaaataacgccgtaaagatttgtactctgccagcaggctggcatattgtcggttcagttcactgtatgcgctgaccagctggtgatgtggtttttccagttctccgcgctgatgcttttctgctgctacacgtgcaaataacacctgcagttttctgtaatcaccctcgttcggcaactgccactgacttgtaccaaaccagtgtgacgccatgtttttctttccggtcgcttccgctatctgtttcgatgttaccccaagtgaatcacgcgcatcacgaaagtaagaaatcagcggggccatgacgtgctgttttagctcgcgtccctttgccgcatagccgtcatttttgggctggtatggcccctgataatgttctgcaaacagaatgcgttctgttgcagggaaatacgcccgcaggctttccttgttgcatccgttccagcgtccggacggcttcgcccagataatgtggttcagcacattaaagcgctgacgcatcatgatttcgatatcagatgccaggcgatgaccacagaacaggtagagacttccggcaggtttcagtacccgccagaattgcgccagacactgatccagccatttcaggtaatcatcgtcgcccttccactggttatcccagccctcgggcttcactttaaagtatggcgggtctgtgactatcagatcgacagagttttccggtaaggtctggataaattccaggcaatcagcgttgattaactcacaactggatatttttacagtattggccatagatcaataagcacttctctgataggctcataccgcttttgcgcaaagcagatgggcctgaggtttgcttgtgaccccaacgcatgagcagatggctggcaggtgccgctaacacccaccagccgcccattaccacaaattaaaaagccttcactgcggaaggcgtctgtaacaaccgaactgataatctgccagacccgccataacaagctgagtcagtattaactggcagcgttcgcgtgaaaggtaagtattctgcgcaatttccccgacagtcgccggttcggtgacgctcaattcattaaacaccactctggcagtttcggtcatatcctgctgttttagcatgtctttttcccttttctggttaacgtgacataccaataactcttgccggaaaagccagcaagctgaaagaccggtattcgtaaccaccagcgcgtttaatgttctgtgccgtttttagggcacaaaaaacccgcccggcggcggttttaagctgtgtgacgtagtaatcactcttaacatcatatttaaatttttacgtacgtaaacctgtacgtataactttatattataaaaatgcaacaactataatattttagatattttagatattttagataaatactgcattggaaattatcaccaatatttaacgccacacataaatgtgatattgatcacactataaacccttaaataaaccccatatcttgaaataaccgtaccgattagatgtatatttaagttgcagcgacattattttttaataatagttcccaaaagaactaaggattcataatgaaaaaattaacagtggcaatctctgctgtagcagcatcagtattgatggctatgtccgctcaggcagctgagatttataacaaagacagcaataaattagatctgtacggaaaagttaatgccgggcactacttctcctctaacgataaacacgatggtgacaaaacttatgctcgtctgggattcaaaggtgaaacccaaatcaatgatcaactgactggtttcggtcagtgggaatatgaattcaaaggcaaccgtgctgaatctcaaggttcctccgcagacaaaactcgtcttgcatttgctggtctgaaattcggcgactacggctccatcgattatggtcgtaactacggtgtagcatacgatatcggtgcatggactaacgttctgccagaattcggtggcgatacctggacccaaacagatgtattcatgactgaacgcaccacaggtgttgcaacttatcgtaacaacgacttctttggtctggttgaaggtctgaattttgctgctcagtatcagggtaaaaatgaccacactgacgtaactcaagctaatggtgatggtttcggtttctccactacttatgagtatgaaggattcggcgtaggtgcaacctatgctaaatctgaccgcactaataataaggttatctacggtaacaacagcctgaatgcatctggtcaaaatgctgaagtatgggcagctggtctgaaatatgacgctaacaacatttacttggccactacctattctgaaacccagaatatgacggtatttgctgatcgcttcgtcgctaataaagctcagaacgttgaggctgttgcacaatatcagttcgattttgggctgcgtccgtccgtggcttacctgcaatctaaaggtaaagatctcggagtatggggcgctcaagacttagttaaatatgttgatgtaggcgcaacctattacttcaacaaaaatatgtccacttttgttgactacaaaatcaacctgattgataagagcgatttcacgaaagcatctggcgttgctaccgatgatatcgttgctgtaggtatggtttaccagttctaaatctttttattaaaaaagatatgttgtgggagatatttatctcccacaacatgtgggtgacgccctcacgtcactgcattaagaaagacatttttgtcttttctttttaaccttctgttatttattaccctaaactcttggggcgtttttgcgccccttttttattcaattttgccagcaaacgttagtcaataacacctaacaacttcgcgatccatctcgagacgaacatccaatgccatcaacattccttcgactattccttcagccttctgaagtttttttcctatatatccatcagaacaatgatgcttacaggccagtgccatgaacgtcataccaaccacataataatctatcagcaaatcatgcaaatcactgttgttctttttcagacgagccatgcaaccacagataaccattgcgtcatcatcacaacattgcgggcgtgacttaacctttgacggaatcagtcctttgaatcccgcagcaatcggtgaccaggtaacatcctcgtggttatttgccacccatgccccccaacgctcaagaaccatctgaatatcacgcatcagcgcagtacctcctgcaccagcttttcaaacttcccaaccttggtttccagctctgccacacaatccaccagctcatccaccgctttttgtgcgcgatgtttagcctgcatcagttccctgagcgctggcaccatatcccgacgaatggcatcttttgttacacctgttttttccagttgttccgcctgtcgcaacatttcctgtgcctgtttacgtagttgttcaggggtaaaagtcattgtttggttgttcaaaagaaacgctccatcttactgctgtcggtacgtgtattgctgtatctgcgcggctggggctgccgcattggggtggaaagaacctgtgcgctttcctggtccacaggcagaaaatgtccgttataaaaacgccggtaaatcgtccccagagaaccgttacgttgtttcgtgatattgatttctgcgatgcccctggcctgcgtatccgggttgtacacttcatccctgtaaagcatcagaatgatgtctgcatccgcctctatttctccggaatttttcaggtctgagttcatgggacgtttattgggtctggactccacaccacgggaaagctggctcagcgcaatcaacggaaaaccaccggattttgccaggcctttaagcccctttgagatttcaccaacggcaaggtcatgacgccccgtggttcgggtttttatcagtccgagataatcaaccaccaccagcgccgtttccggatgtttaatcaggtggtgtttcgttgttgcgcatatctcgtcaatgctcaggttcgcctggtccaccatccagatattgcgcccggtcatccgctccaccccttgagagaaacgtgcccagtcttcgtcttcaaagtgagtgacagatttcaggcatgataccggcattcctccagccgcagataccatgcgttcaccaatctggatgttcgccatttccattgtgaacagaagaacaccatgcccctgctcagtcaccttgtcgatgatatccagcgccagttcggttttgcccattgacggacgagccgcaataaataccaggtcgccgggctccatgccgcctgtttttgcgtccagttcatcaataccggtcttcaacgttctggatttttccagtccctgattccggcattcaacacgctcaaccacttccggaagcacatcatcaatatgtaccggctgaataacgcccttttccgtcgacaatgaggccatcatgttctgcgcatccttcagggcatcttcagctgcttcacaggtatgcgcatcacgtaatttctgcaacgcctcattaagtgttttttctgcatcacgcaatgcagcattgcgacgcaacgccgtaacatagtgctccagtgacgacttcacccaggttttgcgcccggtatcagtaatcaccggggcaagttccggcatatcattacacaacagcacggggtcaatcacgccggaaacacgggcctgtctgcagatgcctgtgtagatatcccgatacgctcgtacagaaaaaacgtccgccggcagtgtggccagaatatccatcacttcaggatctgcccctcgcagaaaaaacgcgccaatgacagcgccttccaggtcatcgttacgccagacaggagaagtcatgctgccacacctccgatatgtgcacggtaactttcccaaccaaacaccaggcagttacgcccaccatcagtaacgcgatccacaatccgttcaccaatggactccttaagttggtcaaacgtcagattgctgatcaaaattgtcggtaaaacgctttcgtaacgtgcattgatgatttcctgcaggatggttatctctgttggcgtaccgaactgcacaccaacctcatcgatgataagcaggtccagcgatacaaaatggtcaataacttcatcttcagtgcgttcagaattgtgacgccaggtatttttcacagcgcgggtcagtcgcatgacatccgtaatttcgacagtcgccaggtggtggcgaataatattttttgccattgatacagccaggtgatttttcccggtaccgcaattgccaatcatgatcatgctggtacccgcagcaagacacttctcccatgaactggcatagcgccgacaagcctcaagatttctctgtgcgtcagcattcacagcctggtagttctcaaactcgcagtcctggaagcggcgggcaataccagctctgtcaagtaattcatgaactttcaggatgcgtaacgcctcctgtacctgatccagttcattcgcaatgcaggtcgggcaaccagacacccgtttgatggtttccccacgaacatctggccctttcaacaccagacgtgtgtatttcccgtgtttctcacactcagcagtttcctcgcttgtcagccagtgttcacagcgccacggacgcttcccggcacgggcaaactgcatctcctcctccagttccgccctgcggttgagcaattgcgctttgtcgtgttgtgcgtagtgtttttttaactgtttaaacattgctcatcacctcgaaaaatcaccagttgaagttcgttgaaccgtagtcctgctcactgaatcccgagatcgggaggccggtagttcgcccacctccgggagcggctggctgttgccaggattcctcaaaatgacgatcgggtccaaagaacgtcgcggcctgcttcacgaactgtgtgccggtatttcctgtagcacgtacccaggcggcataccgcttcacgccatcaagcatggtctccggttttattccctccctgagacgggctttccaggctttgaaggctgctgacttggaattgccaccagcacgtttgggatattcctgccaggcctgttcaaattccggtgaatattcctgtcgggcagaacgcgctggtgcagacgcgtcagcggatgcgccaatagtgtttttagtctccgttgtaatctctgtagtaatctctgtatttgtatcaacattcggcgtatcccctgttccgttatgacgttggggggtgttccgttttaacgtaatagctgtatcgctgattgcgttattgctgttactttctggcgaaacagaagaaggagtagtaatggcagcaattgcctgtgggttgatcccgacaaacaaaatattgctgcatttcacaccatcgagcatttccaccgtgcgtaaatccagggaaataaacccggcatcacgaaggcgcttcaacgcatccgcggtttcccttttcccgaaaccaaactgctcagcaaacgcctgataacttctttgcagcttgtccccctgaaaacgcttgcgatatcccagcaaagccccggtatgctcatccctgacttctgtcgggcggtaccagtaaacgatctctgagagcagggcgatagcggtcgcatccggacgaccactgggtagccgaatatgtttccaccagttcgctggtgtgacattgccggaaatattaatttgaccaatagctataacttccggtgtgggggcgtaacgactcatacagcctccttacgcggcataacaatggtgtaaccccgggcaggctggagccgggcttttgcatcaatagtgagcgttgcaatttttcggatacgcagataccctgccctttctagggccagagcttctctgaacattgcctgttttgaacagcaacaaaaatcggcaaggacttggtgatcaataaccctctcaccttcaccgtctgaagaacccgacatcaaaacacgcaacataatcaggcgctgaatcggattatcgaaaacacttccgcatacaaactgaaaacagttcacacggcacctcccaggcgtttaaacatttttccggactgaaacgccaccagtgggtaactgatggtgtagttacgccccagtaattcacacacaactttctggttttcggtgctgaccagacaaacccgcagaacgtgaccgttgctggtggcaaaccactgccccacacgggggcaacggttgtatcggtgatacagggaattaacgatgcgacgaatcatgggcgcacctcccattgattacggcggaaagcagtgtgattcaggctggtttcagcctcatggaatgcttcaatgcagctctcgtagtaccgcattgtgcgcagacttaacccaagctgaagcatcatcagaccatcaagagtgatgtaataaccacgcagggaatcgccatacacgtggtaagtacccggaatgaaattacgggagaagaattcacgtgagcagttcagatactcgattttgtcgacgatgttctggtgcattcgcttgaaatggcaggcaacatgcagggagaaaataacggccttgccgttgacgacttcgattttcaggtatggggaagttgggactgtagccatgatggcagcctccgtatgcaatggataacttccaccaccggagctgcgaaactcatgggtggtgaactgaacagggttcgcagtaccggcgcatacggaaaccggcgagcctttcggctcccctgcccagcccaccataattctggcgtgcgtgagcgcggacgataaaaaagacgctggcgcgtcatatatcgccgtatgcaattccgggctgcgacccccggcacccgctttataaggtgcagagacagtgtaacgtcccgaaattgcagaatcaatatttaggcttgaaacattcatatgcttactggtatttttactaacgcaaatgttcttggatgttactggcttacttctttgtgaggttgcctttactaacgttgagcgagctgggtcactacccggctttttttcaccgctgccaaccaataacctgaaataaccccattttcgggtgataccagcgagtccctcgcggttctgcttcctccataacctgataaaaagcggccataaacggttccacagcaacaattgcgcgacgtgataacaatccgtccggcgtcataaactcgtgggtatctgtaggaatttgataggcgttcaccagattgcggcatttatcatctgacaaaccggttttcgctttcagttggcgatatccggcatagccctcacgaatggtgccctttttgatttgctcaactgtttcggcaacatggctgactttttcttccacctgagtgatccgtttctgctggcgaacagcttcaagagccatcgctgcaaccatttcgatttcgctcattggcttacggatctgttcttccagttcgcgccagcgatctaccaggcgagcagtgaattcaggacagagctgtgcgacgacaatgatgctgtcgcgcttaccttgttcgccttcgaagatgtaagcacctacatttcgttttaatcctaagttgttgattatttcgaaattcgccattggcgcacttcgaataatccccttatccatgagcctttcaatgctgcgcttaacatctttgtgttggctacccaccagctctgcgatctcaacgctggtcatggatgctttgccgttaaaaattgcggtgttcactgccatctccttacggataaatcttttaagattccgcacattcgtacttgttggtgccgaaccttccttcagttatctttttgatccctataaacaaaagaaccaaaggaggttcgacatgtcacaaaaaaaacgatattcctgtttttcctattacagcctggcaggctggaccattgcccggttatggtgcgctagcattaaaattccagtacctgacttcccctatgcaaccactggattcagcacaagaaactcagttcttcgcgcttactcccgaaatgactgagactttgatctccgatctgcgccgacatattgagacgctgaaaaaatccggtattcacagcccacaagaaaacaggcattaatcgaaaaaacggttgccgcataatttcttgaaaagcgtcgcgcactggcgcttttcatttctctacgatcaacaagcatgcacctcactcctcccccgtgtgcgctaagcttgggtgtgggaaaagctctggtagatctggacgaaattcatacgcttggatctttccgtcgacagctgcaaccaataacggcacaaattcgggtgaaatcttgttcttgcagttaagccaatcacagactgttgattgagcctttccgcatcgcttggctaaggcttgttggctcccaagaatctcaatggctttttctatagctttatgtttcataatcgcatctcctattgacgacatattatcaataggtaaatcgatattcaacgttaaacctagaagtttcatcggaaagccgataaactgcccaacatagagaggagaggaagatcacaatgacattttcagaacgacttgatttagctatgcgcaacgccaaatttacgcaaggcaggctggccaaagaagtaggtatggcccagtcaagcgtcaatcaattacttaacaaagccaacggttccaggaaaacagttgaaatagcaaaagttttgggcgttaacccggaatggctcgcatctggtgtcggtccaatggaaatcgagacctctgcagactcacaccaaatacgtaacatttcagaagacaggattactgattcgtatgtcgtggatgttttagacatcagatacagttgcggacctggtagttataactctgattttccagacattgtcagatctatagcgatagaaccaggatacgcatcaagagtttttggcggcagaccagcatcagcaatcaaagcaataaacgcccacggcgacagcatgaaaggcacaataaaccctgaggacttggtgtttgttgacgtatcagttcgctcatttaatggcgatggtatatacgcttttacatactctggaacatcgcacatcaaaaggcttcaaaaaatcaaagacaccctaacagtgatctcagacaatccagcttacaaagattgggctatcgaacaagatgacttcgagcaacttcacattgacggaaaagtaatcgtaagttggcctatgacgctacaccgtttcgcataagcgataattatttaacatccccgcccactccacgagtgggttttttttgaaaaaatcgacaaaccgattgacaacatgaataggtaaacctattatcatgacataagtatcgaactcaccaaaacaattatagaggatgaggaaaatgtcatcgtatatggggttaccaacaaatcaacacgatgctcttgagaatattcaactcttagtaggggctggagcactactgtatagcagcaataaccctgagttaattgaacttgccagctccatcctggctgtaactcaaaaatatagcctcaccgcgtcgcgttcatgcaaacaaaatttagccattaattcacagaatcggattcgcacccaacgcgaagcctgcggcttaacaaccgccgaactcgccaggctgctcgatctcgatgaagaaatcatcatccagtgggaaagcggagagtatgaaccaactatcagtatgcttatcccactggcaaatgttcttggttgcgacccgatgtggctgttaaccggtaaaccaacagctggagatacttgcgcatgaaaaagttcgaaaacataactgttctccatgttgataactttgattatacaaaccaggaatttctcccggaggttgtaaaggcaatagatgtagccgatatagtgattagaggaaagagaattgtcaaaaacaggctcgcatgcacttcaggagcaatgacagaaacaaccccacagcaagatgattatgaaggcatttgtctggaaccggactcatttgcggtaaatgtttatcatttattgcatgcaacacaggtattacatatgtccagtaataacgaaataaaaacacttggcagcgaaattctgaattttgcatgtgaatatgcaaaagctgctgccgaaaaagaattagcgcaataacaacaaatatgccatgaacgtttattacggttttatcgccggggattgttgcaacctttattcatagaggtaactcagttatgactttcctgaaaaataaggcatcgtataaaactgcctgcctcattgcacaacatggagattcttatcttcatatagccaacctgtatttgcgcaaagcatatgggagataaataaatgaaagaaaaacaacagaacataacacatgaaaaagtaagagtgttgttgaccattgaaaatgggaaagtgatttactcaaaacatctgtcggatgatgaattcgttggctgcatggatacatttctgtggatggtaaaaagagcgggttacacgattattccaccagcaaaggaacaaacattatgaattattcagagttccgaccagaagttacgccacatggcataaaaattggcaatacaaccattgattatgttgaggccgtacagcgacttaatgatggtgaatacgattatccaaactcacacggtttaagaatcatgcaatgtattgctgaagccgatgatgcagggttgctgggacgattttcagtcgatatgaaagttgctcaatggcgatggctgtatgtgactacgtttataaatgaagagaaagacaagaacggtaccgttgatatccctaacgataatggaactacagatcgcgcagttatttacaaggggaaacatggttgcctgagtatctaccccggaccacttcgcattgccctgcaaaaccatgtcgaatggggatttattgaaaaatatggcgaagctgaaggcatggggcgagttctgtttctctatcaaaaaatgctcatcgcagatcctgataatggtttcattatctctgctatggggcgcgaagggcttgaactccttctggatgaaatgattcacgatctgaatactcatggtatgccagaagcgccagtgacacattaaatattaagaagaatataattcttccgttttttactaaccgtttatatgaaaagcaaccgtgaattaagcagagtaaaactgattttaatccttgccacagtgctgacactaactgaaatcattattctctttattgcgctgtcagtcggttaaaaatatcgggataccacagaccaatgagactgtatttcacaatagtaattttactggcaattatcgcatgcatttacggattactcgttccgttccttatatccatgaaggatacgatagcagttatttctggctttgcactggcgtttctgaccccgccctgcatttatgccatttacaagggtctttctttcactaaggataaaagatgaaaaaaattatttttgctttagccattgttctgccgactattggccttgtcggttgcgatcgcgttgaaccaggtaatgttggcatcaaggtaaataaactgggcgacgataaaggcgtcggtgaggtggtcggtgttggtcgctactggactggctggaatactgaagtttacatcttccccaccttcaagcaaatgaagacctacgatgaaccgttcagtttccagatgagtgacggtacaaccatcggctatcacattggcgtggcctacaaagttgatccatccaaagttaccacggtgtttcagacctaccgcaaaggcgtggatgacattacagacaccgacctgcgccagaagatcgccgacgcactcaaccgactggccagcaaaatgaccactgacaaatttatcgacggcggcaagtctgagctgcttgatgaagctcttaaagacattcaggcagagatgacacctatcggtattcaggtaatgagcctctcatatgtgggtaagccggagtacccgcctactgttatcgacagcattaatgccaaagtcacggcgaaccagaaaacactgcagcgcgagcaggaagttaaacagcgcgaagcggaagccaacatgttgcgcgcggaagctgccggacaggctgatgcgattcgcacaaaagctcaggccgaagccgatgctattcgtttacgcggtgaagctctgcgccagaaccccggtgttatggagctggaagccatcaataaatggaacggcacactgccgcaatacatgaccagcggtgctaatacaccatttatccaggttaaataacttatatgcccggcaagtcgccgggctaagggaagatcagatgaacccccagaatactcaaccgcaaataatgaactatgacccgaatctgacgtcatgcggacgcatggcaaaacaaaccgttcgattaactttcgggctatgggaataccgcgaaacattcgaagttactgtcggcggcaatctgaccggactggatgttatcagttgcgctattgaaagcctgtacgcaacgctgccttatgaagaagtcaaggatgagcgcacagggggaacagatatcatggccaccattaatattggcgaactgatatgtcaggatgaagacctgtccggagaactctggcttgccgggatgcttatctcagcagaaattatcagtattgaacccgctacaaacatacgactctgaagttctcactattcagagagcaggagaaaaaatgttcgctttgattaatcagggacaactgtataccgacagtgccggttacccggtaaaaattattcgctgcataaataacactgtgttgtacagaagaatggatgggcgaacacagtcggtaaaaataaacgattttaatgaactgtttgaacggctcgatcaccaggaataccgacaaattctggcagaaacagaactggaaactcatctgaaaaaattacgggccatgaaaaggaaataaagaatgaataaagcgtttgagctatgggtacgccagcgttacggcaatcgctatgacctgacgcgagatgttgacggtttctactgccgtgaaattgtgaaacgaatgtttgaagtgtggtgccactgccgtgggctgagtgttgtgtgaggtaatgcatgggcaatgtgattcaactggctcccaatgaatgggtttgtgaaagcgttcttatcgcaattaccgggctcaaaccaggcacaattctccgggcccggaaagaatgctggatggtaggaagagagtatattcacgtatcgcctgacggtaatccaaaaccttccagcgaatgtatgtataacagaaaagcaatcgatgcctgggtcgcttcaatgaaaaacaaacaacctgggtgatttaataccatgaaatatgtaagctcatatcgctcttgggcgtctggaggtatcgatggataaagtcaaatatccaacaggcgtcgaaaaccacggtggcacattacgcatctggtttaattttaaaggtaaacgtgtcagggaaaatcttggtgtccctgacactgccaagaacaggaagatcgccggagagctgcggacatctgtatgttttgccattcgtacaggaaactttgattacgctgcgcagttccctgactctcctaacctcaaggcttttggggtaaataaaaagaaattacggtgaaagaacttgaaaaaaagtggctggatctgaaacgcatggaaatctctgcaaatgcattcaatcgctatgagtccgttgcaagaacaatgattccgaaaattggaggtagcagactggtgtcaacggtgaccaaagaggaattgctgtatatcaggaaagatttgctgaccggatatcagaattcaacgaaagacaaagcaccagcaagaggacggagcgtcgttactgtaaattattatatgacgacaatcgctggaatgtttcagtttgctgcagatcacggttacttagaagcaaaccccttcgagggaattaagcctcttaaaaaagccagggcagagccagatccgctaactcgtgacgaatttattcgcctgatagatgcttgccggcatcagcagacaaaaaacctgtggtcattggctgtgtacacaggaatgcgtcatggtgagctggtctccctggcctgggaagatatcgatctgaaagcaggaacaattactatcaggcgcaattatacgaaactcggtgagttcactctacctaaaactgaagcaagtacaaacagggttgtgcatcttatccagcccgctatcagtgtcctgaaaaatcaggctgaaatgacaagactgggtaagcagcaccacatcaaggttcaactacgtgaatatggacgttcagtgaatcatgaatgtactttcgtattcaacccccaggtggttagaaaaagcaaacaggtaggttttatctacaaggtagattccattggcgactcatgggaaacagccattaagcgtgcaggcatcaggcatcgaaaggcataccagtcacgacacacttatgcgtgctggtcattatctgccggagcaaatccaagcttcattgccagccagatgggccatgccagtgcccagatggttttcaatgtatacggagcatggatgactgacagcaatgcagaacagatcgcaatgctgaatcagaagctggcagattatgtcccaatgatgtcccatagtcaccaaagtgacacaagaggcctattaaaatcagtgggttagtctttaatacccgtcatgttaactgcgtggagggcaacaccacgctttacgccctgccgaaacccgaggttgtcctgcgctggcgtgagcagaccacagatgacttccgcttctgttttaagtttccggcgaccatttcgcatcaggcagcattacggcattgcgatgatttagtgactgaatttttgacccgcatgtcaccgttggctccgcgcattgggcaatactggctgcaactgcctgccacattcggcccacgggagctgcctgcgctttggcattttctcgattctcttcctggcgaatttaattatggcgtggaagtccgccatccacagtttttcgccaaaggagaagaggaacaaacgcttaatcgcggtttacatcagcgcggcgttaatcgggtgattttagacagccgcccggttcatgcagcacgtccacacagtgaagctattcgcgacgctcaacgaaaaaaacctaaagttccggtacatgctgtactgacggcgacaaatccgctgatccgttttatcggtagtgatgatatgacgcaaaaccgggaattatttcaggtctggttacaaaaattagcgcagtggcatcagaccactacgccttatctttttttacatacgccagacattgcccaggcaccggaactggtacataccctgtgggaagacttacgtaaaacgcttccagagatcggagcagttccggctattccacagcaatcttctcttttctgaatttgccacctatcatagacaggtgccatcggccattttaaagggagtttgtatggtaagcgcgctgtacgccgttttaagtgcgttgttattaatgaagttctcttttgatgtcgttcgcctgcgaatgcagtaccgcgttgcctatggcgacggcggttttagcgaactgcaaagcgctattcgcattcatggtaacgcggtggaatatattcccatcgcgattgtgctgatgctgtttatggaaatgaatggcgcagaaacctggatggtgcatatttgcggcatcgttttgcttgctggtcgtctgatgcattattacggttttcatcaccgtctgttccgctggcgacgttccggcatgagcgccacctggtgtgcgctgttgctgatggtgctggcgaatctttggtatatgccctgggagttggttttctccctgcgttagcgcacaatacgccactttctttttcccggatttttacgttatgtctcaccgcgacacgctattttctgcccctatcgccagactgggcgactggacctttgatgaacgggtagctgaagtcttcccggatatgatccagcgttccgtacccggctattccaatattatttccatgattggtatgttagccgagcgcttcgttcaacctggtacgcaggtttacgatctgggttgttctctgggcgcggcgacgctctcggtgcgtcgcaacattcatcatgataattgcaaaattattgccatcgacaactccccggcgatgattgaacgctgccgtcgtcatattgacgcctataaagcccctacgccagtagacgtcattgaaggtgatattcgcgatatcgccattgaaaacgcatcgatggtggtgctgaattttaccctgcaattcctggaaccttccgagcgccaggcgttactggataaaatttatcaagggctgaaccccggcggcgcgctggtgctttcggaaaaattcagtttcgaagatgccaaagttggtgaactgttgttcaacatgcaccacgactttaaacgtgccaacggttacagcgaactggagatcagccagaagcgcagcatgctggaaaacgtgatgctgaccgattccgtggaaacccataaagcacgcctgcataacgccggttttgagcatagtgagctgtggttccagtgctttaactttggttcactggtggcattaaaagcagaggacgctgcatgatcgactttggtaacttttattctctgattgccaaaaatcatctttcacactggctcgaaacgctgcccgcgcagattgctaactggcagcgcgagcagcagcacgggttgtttaagcagtggtcaaatgcggtggagtttctacctgaaattaaaccgtatcgtcttgatttattgcatagcgttacggcagaaagcgaagagccactgagcgcagggcaaattaaacgcattgaaacgctgatgcgcaacctgatgccgtggcgcaaagggccgttctcactgtatggcgtcaacatcgataccgaatggcgttccgactggaaatgggatcgtgttctgccccatctttctgatttaaccggacgcaccattctggatgtcggctgcggcagcggttatcacatgtggcgcatgattggcgcaggcgcgcacctcgcggtggggatcgaccctacgcaactgtttctgtgccagtttgaagcggtgcgtaaactactgggtaatgatcagcgcgcgcatttgttaccgttaggtattgaacaacttccggcactgaaagcctttgataccgtcttttcgatgggcgtgctttaccatcgccgttcaccgctggagcatctatggcagttgaaagatcaactggtcaatgaaggtgaactggtgctggaaacgctggttattgatggtgatgagaacacggtgctggtaccaggcgatcgttacgcgcaaatgcgtaatgtctatttcatcccttccgcgctggcgctgaaaaactggctgaagaagtgtggttttgtagatatccgcattgcggatgtgagcgttaccaccacagaagagcagcgacgcaccgaatggatggttaccgaatcgctggccgatttcctcgacccacatgatccgggtaaaacggtggaaggttatccggcacctaaacgcgcggtgctgattgcgcgcaagccgtaaaggtctggtattactgccggatgcggcgtgaacgccttatccggcctacaaaaccttgctaattcaatatattgcagggactatgtaggcctgataagcatagcgcatcaggcagctttacgtttgcataacctcagcgcccgtttccgggcgctattcacgtcttacgcctgaacagctggctgatcaaacgccgttaacttcggtgcattgcccgtatatttttcgatatacaccaacgctgagttaccggcacaggcatttgccagctgcgagctggggatatccgccgttaacacgttcgcactgccgtttttacacaagccattttccagatctggccatgcaccttcatgcacgcataccacgccttttttgatcccgtcagtcaccaccgcgcctgtcaaaatctgaccacgtttgttccagacacgcaccagatcgccattcgcaataccaaagcgtgcagcatcttcggtgtgaatagtgattggttcacgatcggcgatcgcatattttttacgcagttccgcatagttaagctgactgtgtaaacggtgtgccggatgtgcggtcagaagctgtaactgcttctcgtcggcggtacctttccattcatcaggagccagccaggttgggtgtgccgggcaatccttatagccaaatttttccaacgtttttgaatagatttcaattttgccgcttggcgtacccagcgcatttttcaccggatcggcgcggaaatcaccataacgaacgtactgttcgttcttctcgctgcggcgcatttcgatcagtttattttgctgccagaaggcattaaacattggcatagtgacgcgttgcgcacgggcacctttctgagcggcatcatagaaaaatttcagccacgccatttcatctttaccttcggtatagatctcttttccgccaggtttgagtaattccgcaagatcggcaaacacgtcaaaatcgttacgcgcttcaaattgcggagcgacagcctgcttcatcggcacaatatgctggttgctgtaatcaccggtcatcgtcaagtcattgcgctcaaacgatgtggtgatcggtaatacgatatctgcatgtttagcagctgcggtccagtagcattcagaaacgacgatcatctccggtttctgccatgctttgatcagacgattagtatcctggtgatgggtaaagttaccgccacccgcccaccagatcattttgatattcggatacgtttgttctttaccgttatgctgatatttgccgccaggattttccagcgcatcgacgatacgggcaacaggaatcgccgtcattccgccatcatcagcggcctcgctggcctgtccggcaatcgccgcagacatttccggcagcacgccgccaacacgcgtcgggttgccaccgttggagtaatgataagagaaaccaaaaccgccgcccggtgtaccaatctgccctaacatcgccgccagcgtcaccagcatccagtgtttctgttcaccatattgctggcgctgaattccccagcctgccatcagcattgtgcgattcgccgccatcagttcagcgagtttgactatctgcgcttccggtacgccagtaatttccgccgcccagaccgcgctcttcggcgtattatcgctcttacctgtcagatattcttcaaactgcggatacccggtggtgtatttttcaaggaacactttatcgtgtttgccttgtgtcatcagggtatgcgcaatccctaacatcagtgccacgtcggtgcccatattcggcgcgatccaggtgacattatcgccaaagaactcgatggtttcggagcggataggatcaatggcaatcactggtttgccagattttttcagctgatggaagtattccagcccttgctcatcggtactgctccaggcaatttttaaggtattcagcgggttcattccccacagcaccacaacctggctgttttccagaatcagcggccaggaggtctgctgttcatacacctctacagaaccgaccacatgcggcatgatcacctgtgctgccccggttgaataatcgccgctatgcccggaataaccgcccgccaggttcatataacgttgcagtaaggtttgcgctttatgcaacacgccagaagagcgccagccgtaagatccggcaaaaatggccgatggtccgttagctttacgaatacgctcatgttgctcatgaatcagttttaatgcctgttcccagctcacctgtacataggtatcttcgccacgacctttcgccggttgcagtggattgtcgagatagctttttctcaccatcggatgctgaatacgcgccgtggtgtgtacctgatccgccgccgtagactgtaaggagttcgttatggttttcgccagcgcgcctgtcgaagaaacaatcttgccgtccttcacttctacgttcatcgctccccaacgtcccgcggtgaggattttaccgcccttctcttctgcccatgcgggtagcggtgctgccgatgtcaccaccagcgctccagcggcaataccgctgtgtttaataaattcacgtcttgttaatgtcataacttcctccctgatcaacgaggatcactgtttctcggtaatatctttggcgttgtactggaaataccgcgttaaaatgtccagttcgttttcgctcatgctggttcgtgcccccattcctttggcaatggaaggccacgcattgacggtgtaatggtcggcggcaataggggcatgacaaccagcgcaataggtatcgtcaagtttttcagcgtattgccatagcggtttacggtccgctaatgcgggatcggtaagcgcaccctgtaaagacgcctgacgccattgattgccgtattcgtcagcctgccatcccccgtttaccgtgagcgccttgataccttcttcacttaatgtggctagcgccagccgttgacctgccgccaggtagagcgtgttttcactgccctgcatttgataaccctgcaacagaacgatcggctgtttgccactggcatcaacgacggtgagatcggtaccaggattcacggtagccagctcgcctatgcgagaagttttgaaaggataaatatgtgcgccattagtcactgaagtagcggcctgactttccagctcatgcgccgcgttgtcatccatttttatttctggcggaaaatgggcaatgcctttatgacaatcgatacaggtttcgccgcccttttgtgctttgttatgcattttctgcgcagattcactttgcgaggctatatccatagcatcaaaagaatggcaactacggcaggttgcagagtcagttgcctttaattctttccatactgtttcggccatttcctggcgatgagcttcgaacttatcatcactgtctattttgccgctaacaaattcatgataaatatctttagatgcctttaatttagcaaataaataatccatccctgactttggaatatggcaatcggcacattccgcacgtatccctttctggttcgaaaagtggacagttccctgatattcctcaaaaggtttactcatcgagtggcaggaaaggcaaaatgctgtatccgacgttttatgtaaggctttttgcgccagcaataacccgccgccaccaaccacaaccgctatcagcaaaaacaataacccaatgcgttttttccctcgcatagattcctctaattaaattccagaacaccgaaatcattgtataattaaatatacaacgaattaaccgcttgcataattcggcacaacactgcctgaaataatcgataaagaatatgatttattacaatgtaatcattaattgctaaggaataacccagttgctatttagaatatatatttattagttttagtaatttaaatcccataattaatgtgaatatataaaatatttttagcacaacgctatgttcactgtcacccgctcaacagatcacggtaatcgttcgttttttatactgttcagggataaaaaaaggcccctgttgaaattgcaggggcctggtacgagcaagcatcatattgggcgacatgatgcaacggtaaaaatcatttggcctgatggcgttcaatgattcctttcatttcagcaaccgccgccccgtctacgacataacgcgaatactcgtccgcgtgtgcatctgatgacatggacaatccttgattacgataacgcatcggtgaggcttgccacgctcccgcggagctatggacttccagcactccggcatcgaggaagtggtgcaggttttctgcacggactcctgctccggccataatgattggagcatcacgatgggcaataagttccataatttttgataaaccttgcagtgcgtctgatttttgccctgatgtcagcacccgggcaatgcccaattccgcaagattattgagtgtatttagagggttagcgcacatatcaaaggcgcgatgaaaagtcactgccagcggaccggcagcagccattattttttccattcgtgacatatcgacattaccgtcaacatcgagcacgcccgttaccagtccaggaaaacctaattcgcggactgtgcgcacatcctcaagaatggcggcaaactcaccgtcgctgtagcaaaaatcaccaccgcgtgggcgaattatcggatgcacagggatcgtcacccactggcgcacggatttcagtacacccaacgacggcgttaagcccccctcttttggggctgcgcataattcaactctgtctgcgccgttttgctgcgccgttagtgcacattccatgctgtaacagcaaatttccagtaatgccatttttactccttaattacgccgactgctcgctggcaacgatctcttcaatggaccacggatgaaacttaatagttgttttgccatcggtgaccgccagcgtcggattcggtaatcgctcatgctcaccttttggcgaactggttttcactgagatccccggtaggctgagtccttcatcagaaagcaatgccagcgcacgggcattcagcgtttctggatcacccggcagaacgatttcaatatgttcccaaccttcgtgtgggtaacgtttttccccgggccacggtagctccacaatagaaaactgccagtgcgcaacctgtaccggttcatgcaatttaaacagacaaatcggtctgccattgatcatattttctgacaaaagctcgccacactgttcaaacccgcgacgccagcgttcagcagtggcgttttgatggcaacgcaaagaaatgtgatcggcagtcagcggagtgatattcaaccccagacggcgggaaagttcatctaatgcgtggataaatcgcggtaaatccgatgcaatatcctgcagctcgtcgatagattgccagttcgccataatcactcttcgtctttcagtaaaagcgttaatttaccctgttgccctgtgccaaccaaccgctgatttcacgccgcttctgatgcaatagtgaaaacggcaatacgccacgcgcacgttgctgacgaaaacagccatttgcagtatactcccgccctaatttctttaactggtgcgggcaatttttgctcgcttcatcaatgtaaggtattccggtgaatattcaggctcttctctcagaaaaagtccgtcaggccatgattgcggcaggcgcgcctgcggattgcgaaccgcaggttcgtcagtcagcaaaagttcagttcggcgactatcaggctaacggcatgatggcagttgctaaaaaactgggtatggcaccgcgacaattagcagagcaggtgctgactcatctggatcttaacggtatcgccagcaaagttgagatcgccggtccaggctttatcaacattttccttgatccggcattcctggctgaacatgttcagcaggcgctggcgtccgatcgtctcggtgttgctacgccagaaaaacagaccattgtggttgactactctgcgccaaacgtggcgaaagagatgcatgtcggtcacctgcgctctaccattattggtgacgcagcagtgcgtactctggagttcctcggtcacaaagtgattcgcgcaaaccacgtcggcgactggggcactcagttcggtatgctgattgcatggctggaaaagcagcagcaggaaaacgccggtgaaatggagctggctgaccttgaaggtttctaccgcgatgcgaaaaagcattacgatgaagatgaagagttcgccgagcgcgcacgtaactacgtggtaaaactgcaaagcggtgacgaatatttccgcgagatgtggcgcaaactggtcgacatcaccatgacgcagaaccagatcacctacgatcgtctcaacgtgacgctgacccgtgatgacgtgatgggcgaaagcctctacaacccgatgctgccaggaattgtggcggatctcaaagccaaaggtctggcagtagaaagcgaaggggcgaccgtcgtattccttgatgagtttaaaaacaaggaaggcgaaccgatgggcgtgatcattcagaagaaagatggcggctatctctacaccaccactgatatcgcctgtgcgaaatatcgttatgaaacactgcatgccgatcgcgtgctgtattacatcgactcccgtcagcatcaacacctgatgcaggcatgggcgatcgtccgtaaagcaggctatgtaccggaatccgtaccgctggaacaccacatgttcggcatgatgctgggtaaagacggcaaaccgttcaaaacccgcgcgggtggtacagtgaaactggccgatctgctggatgaagccctggaacgtgcacgccgtctggtggcagaaaagaacccggatatgccagccgacgagctggaaaaactggctaacgcggttggtattggtgcggtgaaatatgcggatctctccaaaaaccgcaccacggactacatcttcgactgggacaacatgctggcgtttgagggtaataccgcgccatacatgcagtatgcatacacgcgtgtattgtccgtgttccgtaaagcagaaattgacgaagagcaactggctgcagctccggttatcatccgtgaagatcgtgaagcgcaactggcagctcgcctgctgcagtttgaagaaaccctcaccgtggttgcccgtgaaggcacgccgcatgtaatgtgtgcttacctgtacgatctggccggtctgttctctggcttctacgagcactgcccgatcctcagcgcagaaaacgaagaagtgcgtaacagccgtctgaaactggcacaactgacggcgaagacgctgaagctgggtctggatacgctgggtattgagactgtagagcgtatgtaatcgatttttcgtgagagtgaagcctgatcagggttagccgatcaggcttttttattgccatctaaatgtattctgaaaatggacatgccattgttttctcactgttggataagaggccagaagcgtaatatccggccccagggaaacgataacggttgaatttaaggaataccgcagtgtttaaatttcttgtattaacattaggcattatctcttgccaggcttacgcagaagatacggttatagtaaacgaccatgacatttcagccatcaaagattgttggcaaaaaaattcagatgatgatactgacgttaacgtgatcaaatcatgcctgcgacaagaatacaatctcgtcgatgcgcaattaaataaagcctatggtgaagcttatcgttatatagaacaagtgccacgcacaggtgtaaaaaaacctgataccgaacaacttaacttgcttaaaaaatcacagcgagcctggctggattttagggacaaagaatgtgaattaatcctttcaaatgaggacgttcaggatttaagtgacccttattctgaatcagaatggctctcatgtatgatcatacagaccaatacgcgaactcgccagttgcagctataccgtaactctgaagatttttatccaagccctttgacaagaggataattcacatctttttggcatgttttgttgcaagctattcctgataaataattgcaacaagacatcgagcctttttcactgagttattaaacatactcgcgagcgcgtaatttttttgtccttcagcgataattcacaatcacttcattacgttgtacctttagcggtggaattaaccgcccaccgcctggcacttcccagataaatcgcaacggttctgctgccgctataccggaaaaggccacggtggttccgctctgcccctctaattcgacacaacgagattgcgaacacaagcgaacccgcagtcctgaaggtgtcgggccgataagctgataacgccacgctaccagcgtcatcaatcctgaagcaggttgtcgcgtagaaagaggcgcagacgacatcgactcaccgcgatgatttagcgtaattcctacactacttgcctgccacatcccctccccggcggcttgcaccagcagcggaaacaataatattgctaataaggttctcattatttgccgccaattgtcgccgtcatgcggatatgtcggttatcagacagttccagattcgacaggaccactaactgcggcaagctgcggcgcaggaagcgagacaataatggtcgcagcgcgtggttcaccaacaatactggcggcgcacccagcatctcctgacgggatagcgcttcctgagtttgcgccagtaaacgatccgccagccctggctccagtcctcccccgccctgcatcgcctgtagtaacaaacgttccagcggtgtatcgaggccaataacatggacttcatctttgccaggaaaccactgctgggtaatcgcccgtcccaacgccacgcgcacgacggcggttaattcatgtggatcgctttggatggcgcatgttccgccagcgtttcgagaatggtgcgcatatcgcgaatcggtactttttcatcgaggagattttgcagcactttatgcagtgtggtgagcgtgacgacgccaggaacgagatcttccgtcagctttggcatctcctgggcgacgcgatccaacagctgttgcgcctcctgacgaccaaacagctctgcggcatgctggctaatgaggtggttaagatgcgttgctaccaccgtgctggcctcaaccactgtgtacccctgaatctgcgcctgttcttttagcgcactttcaatccagatagcattcaggccaaatgccggatcgacggtcgcctcaccaggtaacgtcccggcagcggttccagggttaatcgccagccagcgccccggataagcatcaccactgccaatctccacgcctttcatcaaaatgcgatagcgggcaggttgcagatccatattgtcgcgaatgtgcaccactggcggcagaaatcccatctcctgggcaaatttcttgcggatactgcgtatacggcccaacaactcaccatcctgctggaaatcgaccatcgggatcagtcgataacccacttccattcccagagaatcttccagttgtacatcgttccacgtcgcttcgacaacggtattattctctgccatttttaccggtttgggttcggcaggcgctttttgttcgcgtccgcgtatccaccaggccagcccgagcaatccggcagtgaacagcaaaaataccaggttcggcattccaggcaccaggccgagtaaaccgagcacggcggcgcttaacaacataacgcttgggttactgaaaagctgattcaccatctgctcgccaacatcctgatcggtgctgacacgcgtaacgatgacccccgcggcggtagaaatcaccagcgccggaatttgtgccaccagaccgtcgccaatggtcaatagcgtataactttccgccgcgtgtcccatgctcatgccatgttgcagcacgccgaccagcaacccgccgacaatgttaatgaccatgatgaggatcccggcgatggcatcgccgcgaacaaacttacttgccccgtccattgagccgtaaaaatcggcttcctgagtcacttcggagcggcgttttttcgcctcatcttcaccaatcaatccggcgttaaggtcggcgtcaatcgccatctgcttacccggcataccatcgagaacaaagcgcgcacccacttctgcgatacgcccggcacctttggtaatgaccataaagttgatgatcacgagaatgacaaacaccacgataccgatagcgaaattgccaccaacgaggaagtgaccgaacgcttcgaccaccttccctgccgccgccgcgccggtatgcccttccattaaaatgatacgggttgaagccacgttaagtgccagacgcaacagcgtggtaaacaacagaatggtcggaaacgcagcaaactcaagcgtgcgctgggtaaacatcgccaccagcaacaccatgatcgacaaggcaatattgaaggtaaacaacaggtcgagtatgaatgcgggcagtggcagcaccatcatcgacaagatcaacaggatcaaaatcggtccggcaaggatctgccattgtgtcgatttcaggtttgcgggcaggcgcagcatcgcggccagattactcatgggtcggtttctcgttaataaaatccagggcttccggcaccggaagatgagtaggttgtacagggcgctgtccaccagccagacgccagcgtttcagttgccagacccaggccagcacttccgccaccgcggcgtacagttgccccgggatttgttgaccaatctccgcatgtcgatacagcgctcgcgccagcggcggcgcttcaagcgtcgggacgttattttcagcgccaatttcacgaatgcgcagcgcgaccagccctgcacctttagcgaccactttcggtgcgctcattttgttttcgtcatactgcaacgctaccgaatagtgggtcgggttattgacaatgacatccgctttcggcacatcggccatcatccgacgccgtgcagcagctcgctgcatctgacggatccgccctttaacatgagggtcaccttcgctttgtttgaactcatcacgaatatcctgccgtgacatacgcagctttttcaggtggctgaatatttggaaaaagacgtcaaatcccaccattggaatgacaccaagcaccaccagcagtgcgcatagccctaccaaatccatcgcattacccatggcggtaatcggagactcggccatcaagcgcatcatctgcggccagtgatgccagagaaaaaaccccgtcacgctgccaaccaggatggttttcaaaattgctttaagcaactccgcgccagtctgagccgagaacatccgtttaatgcccggtagcgggttgagtttggaacacttcggctgcaaggatttgccgctaaataccagccctcccagcatgaccggagaaatgagcgccaccagcaccacgccgctaatcagcggcagcagcgccagcatggcttctctgatcagcagaataatctgcccgaggatcagattcgggtcattgataatactgtgatcaaaatgcagcccagcggagagcatgcccgacaatcgacgggccagcgacacaccgccaaaccagataacactaacgcccaccagcaaaatcagcagtgaggtcagttcacgggaacgcgggatttgcccctcttcccgcgctttttctagtcggtgaggtgtgggggcttctgttttgtcgtcgctctcgtcagacacgtcgccaatcctggaaagagtattaagcgtgaatgatgccagagcgcaaagcgttcaatggtttgagtaaggggcaaaacaggcgggatttagggcttttgctgccacacatcaagcatagtgtgcgtttgtcggatgcggcgtcatcgccttatcagaccgcctgatatgacgtggtcacgccacatcaggcaatacaaatcaaaatccaagactatccaacaaatcgtccacctgatcctgactggctaccacaccggctttgctggtatcgacctgaggtccattaagcaaactctggttttcacgttttggacgcgactcctgttccgggatgttttccaacagcaccatcagcaactggcgttcgatctcctgaatgacatccatcatccgcttaatgacctgcccggtgagatcctgaaaatcctgcgccatcatgatttccagcagttgcgcgttagtaaagctggtatgcgcgggtacatctgccagaaattgtcgtgtatctgttaccagttcacgggcgtcggcaaggtcaatcggatcggcaaaccagtcatcccaacgttgggttaacgcttttgctgatttctccatttgatcctgatgcggttgtgacgcctcaacactgttcagcgcccgctccgcagcctgggcggtcatctgcacaacatagtacaaacgatcgcgcgcatcggggatggcttccgccgcttcggcaatggcctgatccagccccagttcccgcaaactgtcgcgcagcatacgcgtcaggctgccgatgcgcgcaatgatatcgccagctgaatgctcgtcagcaggtttgattgatggttgcatcatagtcgcatcctcacatgcccagtttctcaaagattttgttgagtttttcctccagcgtcgcggcggtaaatggcttcaccacatagccactggcccccgcttgcgccgcagcaatgatgttctctttcttcgcttctgcagtcaccattaacactggcaatgccgacatcgcgccatccgcacgaattgttttcagcaattccaggccatccatattgggcatgttccagtcggagataacaaatccataaccgcctgcctgcaacttattgagagcgtcgacgccatcttccgcttcctcaacattattgaatcccagctctttcagcaggttacgcactatgcgtcgcatggtggaaaagtcatccacaaccaaaaatttaagttctttatccgccatttcacactcctgatttaaatacgtatcgcctgtccggcactaatttttgccaacatttgctggcttacctggctaagatcgaccacttcgcagacaccacccatattgatggcctcgcgcggcatgccgaacaccacgcaacttgcttcgttttgcgcaagggtccatgcccccgcctgacgcatcgccaacattcccgccgcgccgtcgttgcccataccggtcaggatcaccccaaccgcattacgccccgcctgtttggcgacagaatggaacaacacatctaccgaaggccgatgacggttaaccgccgggccatcgtgaattttgatttggtaatttgcgccactacgcgacagctccatatgccgatcgcccggcgcaatataggcatgccccggcaagacacgttctccgtcttcggcttctttaaccccgatctggcaaagcttattaagtctgtcggcaaaagagcgggtgaaaccgggcggcatatgctgggtaattaacagtgccgggctggaaagcggcaacggttgcagtacgtgacgaattgcctcagttccacccgttgaagcaccaatcgcaatcagtttttcagaactcaacaacggccccgccttcagcgttgtcggtgccgacaatggcttatgtgctgcaaggctcgcctttgctgccgtacgcaccttttcagcaatcatttcgttatacgccagcataccttcgcgaatatccagttgcggtttggtgacaaaatctatcgcccccagctccagcgcgcgcagcgtgacttctgaccctttgccggtcagggaagaaaccatcacaacgggcattggacgcaaacgcattaatttttcgaggaaatccagtccgtccatccgcggcatttcaacatccagcgtcagcacatcgggattgaatttcttaatcaagtcacgcgcgaccagcggatcaggcgcggtcgccaccatttccatgtcgctatggctgttgatgatttctgtcatgatctggcgcatcagtgccgaatcatcgacagataacaccctgattttgctcatcgttaatccttacttagcgcatacaccgtctgaccacgcagcgtgaagcggcgctcaaggtggctaaagttttcagagtgacccgcaaacagcaatccgtcgggtttaaggagcggaacaaagcggcgcaaaatctcctgctgggtagtttgatcgaagtagatcatgacgttacgacagaagatcgcatcaaacggccccggcacggtgtactgtttcgccagtagattcagcggggcaaaatcaacatagttcgccagctcctgacgcacgcgtaccagcccttcatgcggccccgtccctcgcatgaaataccgttgcagttgctgcggcgtcaggtttttcaactcttcatggcgatagataccgcttctggctttttccagcacttcggtgtcgatatcactggcaaacactttccagcgtccgggcgcggtgcccaatgtgtcagccagcgtcatcgcaatgctgtacggctcttcgccggtcgaagccgccgcgctccatacgcgatactcgccagaacggcgacgtgcgtgatccgcgagcagagggaaatgatgtgcctcacggaaaaatgccgtcagattcgtggtcagcgaattgataaacgcctgccactcaccgctgtgctgattagattccagcaagttcagataatgaccgaaatccgtcagtcccagcgaacgcaaacgacgaaccagtcggttgtaaaccatgtcgcgtttatggtcagccagaacgatcccggctcgttgatagatcaattgacttatccgccgaaaatgcgcgtcggaaagcgccaggcgctcggtcatctgtaacaataaagacgtttgcccacagggcagagatgaagtcatagcgccttctcaatcacttcaggataccactggcgcaatttgtaactgcaccgactcatgtcgtgctacttcatgttcttcaagggtaaataccgccacacgcgacgaaagatggtcggcctgattcgccagttgttccgttgccaccgccgcttcttctaccagcgaggcgttctgctgagtcacctgatccatctggctgacagcctgtgcaacctgctcaatcccccgctgttgttcttccgacgcagaggcaatttctcccataatgtcgttcacgcgggtcaccgaactgacaatatcgatcatggtcgcggcggcgttattcaccagtttcgaaccctgctggacacgattgactgactcttcgatcagccctttgatctcttttgctgcctgcgcgctacggctggcaagattgcgcacttcacctgccactaccgcaaaaccacgcccctgctctccggcgcgagccgcttccactgccgcattcagggccagaatattggtctggaaagcaattccgtcgataacgctgataatgtcgccaattttttgcgagctggtggcgatctcctgcatggtgtgagtcatggtactgacctgaacaccgcccgcctgcgccgttgtcgcggcattttttgccagttccgacgctgtcgtgcgttatcggcgttttgccctaccgtggcggttaattgctccatactggcggccgtttgtgccagcgatgccgcctgctgttcggtacgacttgagagatcgttattgcctgcgacaatctccgcgataccaatgtgcatctcctggcttcccttacgcacatcacttaccgtcccacgcaaagcctgctgcatggtcttcagactggcaaaaatggcggtgatctcattacgaccatataccgcaatcggacgcgccagattacccgcagcaatgctgtcaaaatggctaccgataatggccagtggttgaacaatcatcttgcgcgtccaccacagcgcactgctgatgtagatcgccgcaacaataatcatgctgataaacaccagtgccgaaatctgatagttacgctggctttgcgcactggcggcttccagcacatggttgatctccagctgccaggcctcaaagttaacgtcaaacgcattctgtgatccctgcaccggcgcagtgaggaaatccgaaagttgattactttcaagccaggtcgcctgatgttcgagatcgttgtgccagcgggcaaaacttttctccgtctctttttgcaatcccctgacgtgctcgttgcccgcagtcatcgccataaaacttttaaacagcgtggtggattgcgtcagactggcgcgcgccgtcgtcatcaacgttttaatgtcatccgccggatagctaagtgccgtcagagtgcccgctttgttcagcgcggtactggcctgtaacattaccgcccgagtttgcgctaatgccgcacgttgctgattgctctgctcgacctgattcagtcgttgcaaatcgtcgcgaaatgcccaaaaagacatgccgttactgccaatctgcaagatcccgcagagaatcaaaattaaaaacagcgtggtcgaaattcgaatacgattaaacatcaacgctccccatcaggcggcaatgaccgcgttagtaaatactcgtcaaaatgtttcccagtttggatcttgttcagcaattcgcagtcgtggctgagccggtggttgctcactggcaggacgggatggtgtttgcggtttattggtgagtgggctggctgccagacggaacgcggaaactgcttgcgttaaacgactcgcctgttcttccagcgcagcggcggcggcagctgattcctgcaccagcgatgcgttctgttgcgtgacgcgatccatttccgaaaccgccaatgcgacttgatcgatgccacggctctgttcatccgatgccgatgcaatctcgcccataatgtcagtcacgcgagtgacagcattgacgatattgttcattgtttccccggcgctttcgaccagcaccgaaccggtatcaacgcgtgagacggagtcttcaatgagggctttgatctcttttgccgcctgggcgctgcgactggcaagattacgcacttcacccgccaccacggcaaaaccacggccctgttcacccgcacgcgcggcttcaaccgcggcattcagcgcgaggatattagtctggaaggcaataccgtcgataacgctgataatgtcggcaattttcttcgaactatcggcgatctcatgcatcgttttcactacgccatccaccactttgccgccgtgctgggcggtgtcggaggcactttgcgccagttgcgaggcctggcgggcgttatcggcgttttgcttcactgtcgcggtgagctgctccatgctggcggcagtttcttccagcgcggatgcctgctgttcagtacgggaggaaagatcggtgttgcccgccgcaatttcacgggtaccggcatagatggcatctgaaccttcgcggacatgagtgacggtgtcagtcaaagagcgttgcatatgtgaaacgctctgcgccaggtcgcccatttcactgcgcccgtcaatggtcagggtattcgccaggttaccaccggcgatttcgcgaatgtgagcaataatttttgccagcggagtaagcaacatacggcgaatgccgtaccacgccaccagcagaatcaataccaccaccagcgcgataaccgccagttgccactgggcaaatcggtaatcatctgcgttgtcagtgacgatatcgcgatacagtttttcactgctgagggcgtactgagcaaacgcttcgcccattgcattttgcattccctgggttggctgagcgaaataagctccagtattgccataatctagataatcaatcagttcagttaacgctgtgtaatagtttttatatttttcatcaatattacgactggtagcgaccatttcaggtaacggtgccatgcttttgaattttttataatgcgtcgctgcctgcgccaatgttttcctggcgctatcgagcaattcaactttggcgttactttgttgattggaggaatccatcatcatccgtaccgctgaacgactcaggttaatgcgcgtttgcagcattaaatcccaggttgacgtcagctcgccctgctgttcccgtaattgattggaaaccacaaagctcttctggctatggtgaagggaagaaaaaaacagactgccggaaataagctgtaacagtgcgaatacccccagcaccattaccaacagcgtgactacgcggatacggttaatcataaggcaccttcctgaaaacaagttgatctcgttatcggcaaggaggggggaaactttattgctgatgccacccgccgcgaaattgaaataaaaaacccgatgcgcagatcatcgggttcatttcaattgaggaaatcgggagaattacgccacttctgacgccgcgctatctaacagcgccatctcttcgctgttcagcagtttttcgatgttcaccagaatcaacatccggtcgcccagtgcgcccagtccagtgagatattctgttgaaagcgtcacggcaaattccggtgccggacgaatttgctccgccgtcaatgaaagcacgtctgagacgccgtcaaccacgatgccgaccacccgctgtccgagattcaggacgataactaccgtgttgtcgttatagtccacatccacctggctgaacttaattcgtaagtcaacaatcggcacaataacgccgcgcagattcgtgacgcctttgataaacgctggcgtgttcgcaatccgtgttacctgatcgtagccacggatctcctgcactttcaggatatcaataccgtactcttcatcaccaagggtaaataccagaaattcctggcctgacggctcgctggccagctttgttacattcgtcataccggtcatattgttacctttttactcattcaggcggcggtgttcgccatacgttgttcgcggtttatcgcctgcaaggcggagacatcaacaatcagtgccacgctgccgtcgccaagaatggtcgcagcagaaatgccggggactttgcgatagttactttcaaggtttttaaccacaacctggtgttgaccaattaattgatccaccagcaaggcgtagcggcgaccgccactttgtaagatcaccacaattccctgggtggcttcggttttcgcgcccgcgacgttgaacactttccacagttcgacgatgggcagatattcaccccgcacttccagcacccgctcgccgccggccagtggatggagatcggcttcacggggttgcagtgattccataacagcattcagcggcagaatgaaaacttcatccgcaacgcgtacggacatgccgtcgaggatggccagcgtcagcggcagtaaaatgcggatcgtagtgccagtaccctgcttcgactggatttcgacatgaccgcccatctcctggatattacgtttaacgacgtccatgccgacgccgcgcccggagacgtcggtgacctgctctgccgtggagaagccaggtgcaaatatcagcatcgcgacttcgtcgtcgctcatgttttcgctgacagtcaaaccttgcgaggccgcttttgccagaattcgctcacggtttagccccgccccatcgtcggtcacttcaatgcaaatgttgccgccctgatgttcggcagacagaattaaatttccgacgctgtttttacctgcggcgagccgtttttctggcagttcaataccgtgatcgaggctattgcgtaccaggtgggtcagcgggtcgataatgcgttctatcaggcttttgtcgagttcagtagaactgcccaccagcgtcagttctacctgcttgccgagttttcccgccagatcacgcaccagccggggatagcgactaaaaacatattccatcggcatcatgcgaatcgacatcactgattcctgcaaatcacgggcgttacgttgtaactgccccatgctggttatcaaatcaccatgattaaccgggtccagttcgctggaacgctgggcaagcatggactgggtgataaccagctcgccgacgaggttaattaattgatcaaccttttctaccgctacacggatgctggtggattcattgctgcgcgtcgttttttcccgctccacgcggccggttggcgcttgttcggctgccagtttaagcactggtggggtggatatttttggcgagacttctactgtttcaaaggtaatctgatcggcttcaatcacaaaacagagtaccgctgtgatgtcatcttcggcgatgtcgcccggtaatattgccgagagcgaatccgcccctttcaccacgtcagttaacgttgtcagatgtcccagttcttcttccagcaggtcgacttccccggccttcaggcgcgaaaggataattcgtcgcggcgactgactgcgactctgctcatcttgcggttcacttttggcaaccacacttaatcgggtcactgcggatggcgtttcgcctttcgcttctaatgccagttgacgcaaggcctggcagatataatcgaagctggcggcatccggctcttgcgactgtttataagcgtcgagctgttcttgcatgatgtccttcgtttccaaaaacagattgataatgtcggtgttgagttgcatctcacctcgtctggcttcatcgagcaggttttccatcagatgcgtggtttcctgcaaaacgctgaagccaaaagttcctgcccctcctttgatcgagtgggcagcccgaaagatggcattcaattgttcggcatctggcgcttccggctgcaaaaccagcaaatgctgctccatgtcagccaacagttcgtccgcttcatcaaaaaatgtctgataaaaatcgcttatatccatgctcacgctgtcacctcggttcggctgatggcattgtgggaacactgacctgtggtgcaacctcaggtttttccagggcgcttactggctcattctggctttcggcgttttcatgcaaaatggcctgttcggcttgtttgttcagtaccagcaggctgatgcgacggttgacggcatcatcaggtccgcgatcgcttaagcgcatcgttgccgccatgccgacgacacgtaacactttgccgctatccaaccctccgaccatcagttcgcggcgggatgcattggcccgatcggcagaaagctcccagttgctatatcctttctcaccgctggcgtaggggaaatcatcggtatgacctgaaaggctaatacggttgggaataccgttcagtacaggcgcaatggcgcgcagaatgtcgcgcatatagggttcgacatcggcactgccggttctaaacatcgggcgattctggctatcgatgatctgaatacgtagaccttcctggaccagatcgattttgagatggggacgtaacgcccgcagtttcggatcggactctatcaactggtcgagatcaccccgcaatttccgcaatcgactttgctccatgcgttttttcagctcttcgatgttcggctgcttattcacttccccctggctttgggtgtaatcatcaccaccgccgggaattgggctttcactattagaaatgcgatcgccgcccgtaaccgcagtcgccagtggagtccggaagtactccgcaatctgaatcagctcttttgggctggagatggagatcagccacatcaccagaaaaaaggccatcatcgcagtcataaagtcggcataagcaatcttccacgatccatgtgctgccccgtggcttttggctttgcgtcgtttgacgacaataatcggatgcgcttgattcttcatgcttcctcggttgtcgtctgttgttgcggatttttcaccgcacgcacatgctcttccagttcaataaacgacggacgttcgctggaatagagcgttttgcgaccaaactcaacggcgataggcggtgcgtaaccgttcagattagaaagcagagtgactttgacgcactgcatcattttgctggtttcggcgcttttctgacgtaaaacagtcgctaatggggaaataaatccgtaagccaataaaatgccgaggaaagtccccaccatcgcatgtgcgataagcgcacccagctcggcggcaggacgatcggctgaacctaacgcgtgaacgacccccattacagccgcaacaataccaaacgccggaagtgagtccccgaccagcgccagactgttcgccgggacttctgcctcgctttcgtgcgtctcaatctcttcatccatcagagcttcgatttcgaaggtgttcatgtgaccgctgataatcaggcgcagataatcgacgataaaatcaagcatgacgctatccgcgaggatgcgtgggtagctggcgaagatctcgctctcacggggattttcaatatcacgttccagcgaaaacatccccatctgccgcgatttcgccatcaaccgataaagcagagccagcagatccatatacattgctttggtgtatttggagcgacgaaacagcaacggcagcgccttcagcgtgcctttaatcgctttgccattattgccgacgataaacgacccaatccctgcaccggcaataatcaccagttcagcgggttgatagagtgctccaaggcttccaccggtcatcaaataaccgccgaaaactgtaccgagaacaaccaggtaacctaataagataagcacgacatcatccttccactgttgaccatgacaggatgttcagtcgtcaggcgttaacgcgcgattggggcaaaaaaaagcagcggtacgtcgttaccgctgctggaatgttgcgcctcaccgtatcagttaaacagcctgtactctctgttcatccagcagttgtgggataatatcggcaggattctgggaaagtttacgtctttttactgcccgggatggcggttgacataagctgcaggcaaagctgccaacaggctggtgagcgtgggtaataaaattgccgccgcagcagttgcagctggaaagttgcagtaatccactttcaacaaaccgcaccaatgtccaggcacgggttaatgccagcagtggtccttcttctgcttgtgggcactgttcaaggtataaacggtaggctttgatcaccgcatcgacgccattacacaaaccggttttcagtaaaaactgccatgcattacagaacatcgaagcatgaacgttttgttcccaggtcataaaccagtcggttgagaatggcagcatgcctttcggcggtgggcttccgcgcagttctttataaagttttatcaggcgtccgcgacttaactgtgtttcgctttccagcatctgcaaacgagcgcccagggtgatcaattccattgccagctgaatatcccgcgcttcctgaacaatgcttttttcactcatgatcaggcccttttcttgcgcagcgcttcttcaggctgattaacatcattcagcaagcgtgttgagagcatgatgccggtatgaatttgctggagatcgtcaacgcgggaatcttgcgtcaactgagtaatcgtctggtggctgtcaaaacggaagtgacaaaccagttgattggtttctgccagcttaaccatttgcggaagagtcagtgccgctaacgttgtcgccatttcttcatttatgccgagacgaaacatagcggacgctttgtcctgaacaatcaaacgctgtgcaagtagtaaatatgacaagttgatgtcataaatgtgtttcagcaactcggaggtatgcattattcccacccagaataaccaactttatttttatgcggtttcaccgcaccccgtgatgtcgccgggaagccccggtaaaaaataattagcattagaatagttgcgataagctgcaataagcagaaccacctttttggtttaatatgtccttacaaatagaaatgggtctttacacttatctaagatttttcctaaatcgacgcaactgtactcgtcactacacgcacatacaacggaggggggctgcgattttcaataatgtgtgatgcagatcacacaaaacactcaattacttaacataaatgtataagtcatacttttgttttgggtgtatttcaatctgttaaaaagtttttcgctacgctagcaagcaaaaatgaaacaggaataatcgaaatgggatgttgcgcacagtcaaaataactcaccgtaaataatcatctgctataaataatcactttcatgcaataccagataagctatttttaaacagacacttaccgcacaacaaactaattaaatacaaagaaaggcaacaatcaacttaatgttaatgaaatgttttacatatattaaccacttgtttaatgcggagaatcagtacactattttcttataattacatttgaaattatatgatcaccgggagtgattgattaattgtctttactaataatcagactaatatttacctgtttgaccgagttgggattgcgtcgtttctccattaggagtaaagctttaatgtcacctgaagttcacagaataaggaacaggttatgagctatagcaatattcttgtcgctgttgcggttacaccggaaagtcagcaactgctggcaaaagcggtatctatcgccaggccagtaaagggacacatcagtttaattactctcgcttccgacccggaaatgtacaatcaattagctgcgccgatgcttgaagatttacgcagcgtgatgcaggaagaaacgcaaagctttcttgataagttaattcaggatgcggggtatcccgttgacaagacgtttattgcctacggtgagttaagcgaacatattctggaagtatgtcacaagcatcatttcgatttggtgatttgcggtaatcacaatcacagtttcttttcgcgagcatcctgctcggcgaaaagagttattgcctcaagtgaggtcgatgtgctgttagttccacttacgggagattaaccgctcctacgcaagctttggaaaggtagcaactttatcgcgctgctggctttccgcgcttcgcggaactatctgctttaggtcgctgatgaagcactcctgccagtggttaatatcgtttttcacgataacgtccagcgtttctgcatgacgggaaatacgttccgccagcgacatagtcaatgcacgatccagcgcagctgcaacttcgtcacgatcgtaggggttaacaattaacgccgacgttaactcgtttgccgctcccgcaaattgcgaaagaacaagaacgcccggattggctgggtcctgagcagcaacatactcttttgctaccaggttcatcccgtcacgcagtggcgtcactaagcccacgtcagagtagcggaatattttcatcagtaatttacggtcaaaatgctgattcaaataataaagcggcgtccagcctaattgcccgtatttaccattaattcgtccagcttcattttcgagctgatgacgaatatcctgataggcttgcacatcaccacgcgacgttggtgcaatctgggtataacgaattttaccatgatgctgcggatatttttccagcaacgcttcataggcgagaaaacgctctggcaaacctttggaataatccagccgttcgacagaaaagatattttgtacgtttttcagttccgctttaagttgcgccagttttggcggcagtggcccggcagcctgtttggctatttctttcggttcaatgccgatcgggtagacttctgttcgaaatgctttgccccaggctgtatggctttttgcgctacgtgtcgtgacgcgggtcaggttagaaagacaatccaggaacgccagacgatcgttttctgtctggaaacccagcaaatcataatcacaaagctgttcaagcaaggtgtcatatgtcggcagcgcgttgaagatttccggtgtcgggaaaggaatatgcagaaagaaaccaatgcgattattcactccccgtttgcgtaattcatgcgcaaatggcaacaggtgataatcgtggatccagataatgtcatcgtcttgcaacagcggcagtaatttatctgccagcaacgcatttacgcgtagatagccgtcccaggcaggacgctgaaattgcaccagatcgagccgataatgaaaagcgggccagagaacggcattggagaattggttgtagtattcgtcaaggtcctgttcgctgaggttaaaagaggcccacgtaatgttaccttttttcaccttttttagcggctgatcctcattccctgtttcaccactccagccaaaccacagtccgcctgcggctttcagtgcccccagtatgccaacggcaaggccaccggcactggcggcgtgctcgtctggtggtgcaatccggttagatactacgactaaacgactcatagtcatcactcctgttattttctcttttttgttgtaatgcggtggttatcatttcaagccagctccagacatccggcacacccgccagtcgccatgatgcctgagttgcacctgtgccaatttttactgacattccgcccagtcggttaacgactgcgaagccagattcatcggttaaatcatcgcccagaaatacgggcgttcgcccgataaagggagcttcctgcataaaagctgcaattgcctcacctttactggtacctctcggtttgatctcgacaacacactttccctgctgtaacgccatttgtggccagatctgagtaatacgttgcgctaatgtcattaatgcgtcttcatgctgcggagcctgacgataatgcagcgcaaaagccatccctttcgcctccagctccgcgccgggatactgagcgatgactgtatgcagttgcacgctaatatcacgcgcaatcgcatccggcagatgaacgatatgtgttttaccattgatgtcacggcgctccgccccatgcacgcccgctaacgggaagcgataaggttttgccagtgcgtcaagctccaccattgagcgccctgatatcaatgccaatgcaccatcacttgcggttgccagtagctgtagtccttgcagaatattgtcaggcacgacgacctgatcgggatgcggtttgatttccgccagcgttccatcaagatcaaaaaaccaggcatatttcgcggatagttcaggggtttcggttaacggttctgtcacccggttctcctccttctcttttcttattgtgttgcgcagaacgcgctttacagacatgtaagtatagacagtgtgacgggggtcgccatttgcaacgaagaacagccaaccgttatggcggttggctatggtgggaaaaaacgctaaattgttgcagaaaaaagcatcagacagtgcgtttcgctttttgcttgtaacggtcgaagatcaccgctgccagcaggattaagccgcgaaccacgtactgcgcgaaaggagaaatattaagcaggttcatggcgttttccacggtgcctaaaattaagatacccgccaccacatatgagatttttccgatgccacctttcagagaaacgccacctaaaacgcaggcggagataacaatcagctcataaccaatcgacgtcattggctgcccactggtcatacgtgaagccagaataattccggctatcgctgataccaggcctgagagaacaaagataataattttggtgcgaacaaccggtacacccgccagacgcgcggcctcttcgttcccgccaatcgccagggtgttacgaccaaaggtggttttattcagcagcaaaccaaagataatcagacacgcgacggtgagccagattggcgcaggcagaccgaaccagttggcgtaaccaagggcaaagaagctttcatcttcgataccgaccgctttaccgtctgaaatgatgtacgccagacctcgaacaatctgcatcgttgccaatgtcgtgatcagagcatttattttcagtttggcgataacaaagccattgaccaggccacagagaacgcccagcaacaaccccgctgccacgccaatccacaggctttcagtcaggttaataaccaccgccgtggtgacacccgcacaggcaattacggaggcgacagaaaggtcaaagtcaccggaagcgaggcagaacaacatgccacaagccaccatccccgacatggaaattgccaggcccaaccctttcatattaatgaaggtggcaaaatttgggacaaaaatggcacaggcgataaagagcaccgcaaacaccaccagcatgccgtactgatcccagatacgcccgaagctgaatgacgacttaggtgcgccagaccccgatgtagaaacagaagacatcatactctccttactcaggcaacagcctggctgactttaggcatcgcaaggctcagtgcctgacgctcatctgcctgctcgtgtaacaattcaccggcgatttcaccttcccgcatcaccacaatccggtcggcaacgccgaggacttcaggtaagtcgctggaggcaaacagcaccgccacgccctgcgccgccagcgcataaattacgttatatatttcgtgcttagcgccaacatcaatgccgcgcgtaggttcatccagcaaaatgaccttcatctcttccgataaccagcggcccagaatggctttttgctgatttccgcctgagagattcatgatcagttgctccgcgcccggcgttttgatgttgagcgaacgaatgtggtgatcggcattgttttcttcccaaccgttgttgattacacaaccgccgagcacatgtttacgtctggcactgatgttgatattgtcgcgaacggagtgcacgggaataatgccttccgctttgcgatcttccgggcagagcatcatgcctgcggcaatggcgtggctcggtttacgaatatcgatcggctgttggtcgatataaacctgaccggcggtgatttgcgtcccgccaaacatgcctttcattaattcgctacgccccgcccctaccagaccaaacagcccaacaatttcaccactgcgaaccgccagacttattggcgtacgcacgcctggtgctttcacagcatcaagacgtaggcgctcctcgccataactacgcggttgccagccgtagatatcgccaatgtcgcgcccgaccatcgcctgcaccagcgcgtcgtggtcaacctgctgcatatcggtaaaggttttgacataacgtccatctttaaagacagtaatggcatcgctgagggcaaatatttcttccatacggtgagaaacgtataagattacccgcccctcttttcgcagttcacgaataacgcggaaaagattgtcgatttcacgggcagagagggagctggttggctcatcaaaggcgataattttggcgttacgcgccagcgctttggcgatttcaaccatctgccactgaccaatggagagatatttcagcggcgtgtccgggtcaatatccataccaagatgtttaagttgtaaacccgcctcataattcagcaatgagcgattcacaatgccgcctttatgcggcagctggccgagatagatgttttccgcgacggtcatttccggcacgagatgcagttcctggtaaataatcgccacgcccgcgttaagtgctgcggtcgtgtcggaaaaggacatttcctgcccattaatcactacagaacccgtggttggcgcatagttgccgctgaggatttttaagagagttgattttcctgcgccattttcacccatcaacgcatgaacctgaccggcatagcagtcaaaactaatatccgtcagcgccttaacgccgggaaacgttttaccgatgccgcgaaatgagagatacggggtagactgttgcataacgtctccgtgaatcactggtcgttcacaccccctctgcatcatgcagaggggaatttttccggcaaattacttaccgcctaaaccttttttctccagttcttctttaaagttgtcacgcgtgatcagtaccacgtcggtaacttcggtaaattttggcggttcaacgtcttttgctacccagttgtaaagcatttcgctggatttatagccatgtacgtccgggcttggcagcagggaaccgtagaagccggttgcctgtgctttagacagttcgctcaccgcatccacaccgttaatgccaatgccgatgatatcggccgctttaaagccctgaccttccgtcgcgcgtacgccgcccagcacggtgctgtcgttcataccgacgatcagccaatgtttaacttccggatgttgaaccagcattgagttggcagcgtcaaatgcccccgggatgtcgttagatttggtaggtacctgataaatttgtttttccgggaatccggccgctttcagcgcatccatagatcccgtagtacggcggcgggcggtatccagttcgttggcggtaatcgccatcaccgcgctttctttgacatcccagccacgtttctgcatctctttatacagttcctggccctgacgttcgccaattttagtcgccgccatcatcaccagcggaacggtatccattggcttacctttggcgttaacaaactggtcatccacggcaatgactttcatatcgtagccacgcgctttcgcgacgatggcagagccgagtttggggtccggagtacaaataacgaaaccttttgcgccactggcagccaggctgtcgatcgcgttcaatgttttttcgccatccggcacggcaatcttaataacctcaaaccctaaatccttcccggctttatcggcaaacttccattcggtctggaaccacggctcttccggttgcttcaccagaaaaccgagcttcaggttctccgccatagcggattgtgacataacggctgccagaccaatggctgccagggctttagtaaatttgtgcatggttctctccagctttagtgtcgttttgtgtagggcaaaaacgaatgacattcgttaaattaatcggaaaacaaagcattaccttttaactaaaagataagtgactgtgttgacatagttttagcgagaaattaattctccataggagagcaatatcacatcgcagaattacagtgagaacgtgcataaatttagcgggaaaagacataagggaaagccaatttgtcagacaaattgtcgaatgcacagcagattaatccataagattagcctggaaatccttgttgtctttggtacccatgcgggatgtcttctttttaaccagtcaataggccgcattacctggcgttgagtttttgaaatggtgtaataaccgcaactcaaagatgtggaaaatgcacgtcattcatttcgtcattaattatcactgtgctcattaattaacagaacacgtataatgagagccatctcgcaaaaatgaaaaaacgttttataaaatcatcacttcatcatgaattcaaattcattgattaatatcaacaagatacaaaaagcactatcattaaaattcattgcagttacattgatttcatcaatgaaatgtaaaaatatataaacttgatgatttaagcattttcttatacccgttcagacgttattcttatttcagatcatcgtcagaattgactccacgatcacatttcggaccggcagaaaggaattattctgcaaacagtaattatggtgttttgatttatcttgcacctctccacttctggatataaggatattaggtatggcaaccgctggaatgcttctcaaactcaactctcaaatgaaccgcgagttttacgcatccaatctctaccttcacctgagtaactggtgttctgaacagagtctgaacggcaccgccactttccttcgcgcccaggcacagagtaatgtgacccaaatgatgcgcatgtttaactttatgaagagtgtcggcgctacccccatcgttaaagccattgatgttcccggtgaaaaactgaactctctggaagaactgttccaaaaaacgatggaagaatacgagcaacgttctagtacgttggcacagttagccgatgaagcgaaagaactgaatgatgattcaaccgtcaatttcctgcgcgatctggaaaaagaacagcagcatgatggtctgttgctgcaaaccattcttgatgaagtgcgcagtgcgaaacttgcgggtatgtgccctgtgcagaccgaccaacatgttctgaatgtcgtgtcacaccagctgcattgatcatcatcggcgctaatgcattgcgccgatgaaggttttgagaaaccgctgcctcatctgtttgaagcagcggtttttttaatgggattcaccctgtggggtaaacttgagttcaataagcgcgatggctttttggattgcccgcatggtgaccgggtctgcggcggcgggatggttagtaaagtcgatattcttcagctgactggacattttttcacgaacttcaacgggcgcgattacatcgagaacatccagaatttgtttgataaccaactggcaagcaaccacatcagaaaccaattcctgatcggcattcagcggctgggacatcgtaaactcctgatagcattttgaaagccgttatagtagcgacttcacatcttcagcgatagtcacatccaccgtcatcaggacacaaaaaaacctgccggagcaggttttttgttatcggaacatattgcctggcggtacgtctttgaacgtcttgcaatagttattgaacatacttttcaggattttgcgcagtttcatcgcggcactccgaccatttgttatacaggtgttattgtctttgcgcttataatatgacaaccatcacaaaaatcaatctttatgtgatacaaatcacataaatacccctttaatgttataaaaatgataatcaaaaaacagcccccctatttctgacacctacagatggcaagaaatagcgcctgccaggcgtcttttccggccattgtcgcagcactgtaacgcgtaaaatagtgctttctcttactcttctggctggaccatgagacttctgattctgactctttcattaataacgctggcggggtgtacggttactcgccaagcccatgtgagcgaagttgacgcggcaacaggtattgtacggttagtttatgaccaggcttttttgcagcatgcccataccgatcgttatgtcagtcgcgggatcgccgatcgcgcatgccagcaggaaggctatacccacgcggtcccctttggtcagccagtaggcaactgtagcctttttgcgggttccttatgtttgaatacggaattcactttgtcatatcagtgccatcattccgccttccctgtctttctctaaatattttaatcagcgaggggatcttcgctgattaaagaaatagcggtaatgcgttttattcccattcgtatttttaataattgaagtttatattttaccttttgcaaataataaaataacaaattatagtgacgccacagcaactaatataacctttgtggagcactatcatgctgaaaccagaaatgattgaaaaacttaatgagcagatgaacctggaactgtactcttcactgctttatcagcaaatgagcgcctggtgcagctatcataccttcgaaggtgctgccgcgttcctgcgccgtcacgcccaggaagagatgacgcatatgcagcgtctgtttgattacctgactgataccggcaatttaccgcgtattaataccgttgaatctccgtttgctgaatattcctcacttgatgaattattccaggaaacctataaacacgaacaattaatcacccagaaaattaacgaactggctcatgctgcaatgaccaatcaggactacccaacatttaatttcctgcaatggtatgtttctgagcagcatgaagaagagaaactgttcaaatcgattattgataaattaagcctggcaggcaaaagcggcgaaggtctgtattttatcgacaaagaactctctaccctcgacacacaaaactaatgctctccggcggcaggtttactgccgccgtttcaaatcagtgacggcaaatcttactctgatcggtcgaaaaaccgtctttcgaaggtataaatttgccttttgctgccagaaacgctaccagctctcccgctgtcatcccttctgccgagcaggtgtgaaaacgtgcctgttcaccaaaacgcgctttaatcgcagcttccagactggcatgcgtatattgctcgcctgattcaatcatcatatttaacacttcatgaccgtgaatagagtccatcgtccctcctcaaaaaaagcctagcgtagcgattgtcgcttatgaagactttgcgccagcgcaggactgaatgctttttattgtacatttatatttacaccatatgtaacgtcggtttgacgaagcagccgttatgccttaacctgcgccgcagatatcactcataaagatcgtcaggacagaagaaagcgtgaaaaacagaaccctgggaagtgtttttatcgtggcgggaaccacaattggcgcaggcatgctggcaatgccgctggctgcggccggtgttggttttagcgttacgttaatcttgttgattgggctttgggcgttgatgtgctacacggcgctattgctgctggaggtgtaccagcatgttccggcagataccggtctgggcacgctggcaaaacgctatctgggacgctacggtcaatggctgacgggcttcagtatgatgttcttaatgtatgctctgactgcggcatacatcagcggtgccggtgaattgttggcctccagcatcagcgactggacaggtatttctatgtcggcaaccgctggcgtgctgttgttcacttttgttgccggtggcgtggtttgtgtcggaacttcactggtcgatttatttaaccgttttctgttcagcgccaagattatttttctggtggtaatgctggtactactgctgccgcatattcacaaagtgaatcttttaaccctgccgttgcaacaggggctggctctgtctgcaatcccggtgatttttacgtcgtttggttttcacggtagcgtgccgagtattgtcagctatatggatggcaacattcgtaagctacgctgggtgtttataatcggtagtgcgatccccctggtggcatatattttctggcaggtggcgacgcttggcagcattgattcaacaacctttatgggattgctggctaatcatgctggattaaacgggctgttacaggcgttacgcgaaatggtggcctctccgcatgttgagctggcagtgcatttatttgctgatttagccctcgccacgtcatttctcggcgttgcgttaggcttatttgattatctggctgatttatttcagcgttcaaataccgttggtggacggttgcaaactggtgcaattacgtttctgccgccgttggcgtttgcactgttttatccacgaggatttgtgatggcgctgggttacgccggtgtggcgctggcggtactggcattgattatcccttcgctgttgacctggcaaagcagaaagcacaatcctcaggcgggttaccgggtcaaaggtggtcgtccggcgctggtggtggtgtttctctgtggtattgctgtgattggcgtgcaatttttgattgcggcagggttgttaccagaagtggggtgatcagatagcctcaaattccttattgggtgccagaattaacgctgacacccaatttggcctcttaatgcaggcagcactgcttaaatttcttaccactaccgcacgggcaaggatcgttacgccccggtttctcttctgctttgatcggttgctgaacagctttttcctgcggatgcgccatccagtacgcatgtagatcaagcgccgccagtcgaatggcatctacgctctcttcaaacgcttctggcgacatcttttctacccgctcgaagttttcctcagtaccgtgcagcgcaatcgcctccagcgctggttttaacgaatcgggcaacgttgaccagtcagaaagtgccacgccccgcatatagccaaagcaccactcctcaacaatcgtcagctcgctgccatcaacttctcgcaagccgaataacggctcaaactgctccgggaattcgttcagacgctctgcggtatcggccatatgttgaaaagccagattcataaagcgcgtcatctctttctctgacgcccagcgcggcacatagtcagccccaccccacacggcaaccagccactgttccggttcaatctcttgcggagaactcaacaccgccgtcaataaaccgtccagctccgccacatcaaggatggcgtggtcagtgttgtatttggtcagaatatcgtccagccattccaactcactttcgtttaacggtcccgttttcatacgcttttccttgtggatctcaactcgccagcacctatcttacatgccggtccgtatcagagatactttttgagtggctttgctggtgattaaaaattaaggagggtgtaacgacaagttgcaggcacaaaaaaaccacccgaaggtggtttcacgacactgcttattgctttgattttattcttatctttcccatggtacccggagcgggacttgaacccgcacagcgcgaacgccgagggattttaaatcccttgtgtctaccgattccaccatccgggctcgggaagaaagtggaggcgcgttccggagtcgaaccggactagacggatttgcaatccgctacataaccgctttgttaacgcgccaaattcttcaggcctttcagccagacatccgcttgacgccgatgtcttttaaactggagcgggaaacgagactcgaactcgcgaccccgaccttggcaaggtcgtgctctaccaactgagctattcccgcattcatcaagcaatcagttaatcacttgattttattatcgtctggcaatcagtgccgccgttcgatgcgttgcattctacttacctggcgcgatgagtcaacgatatttttcaccacttttgatcgtttgctgaaaattacgccgaaacgatcactgatcaagcaaatctgcacgcgcagcgctcaaatattgcaacattgaccacagagtcagtaccgcagccacaaagaaaagtgcaataccggcgtactcaacccaaatgttcggacgccacagcagccatgccaacgccaccatctgggcagtggttttcactttcccaatccaggagacggccacgctactgcgtttacccaactccgccatccattcgcgtagcgcagaaataataatttcacgggcgatcatcgttgccgccggtaatgtcacccaccagctgtgataatgctcggttaccagcaccatggcgatagccacgagaactttatctgccacagggtcaaggaaagcaccaaaccgggtactctggttccagcggcgtgccagaaaaccatcgaaccagtcagtcaccgccgcgacgcagaaaatgagcgcggcggcaaacggcgaccaggtgacaggcagataaaagaccaatacaaagaatgggataaggatgacacggaacagtgtaagcaacgtagggatattaaattgcataatgacgggtaactatctgttgtcagtaagattacccctatgttgctacagagacatcaatgtttcaacgaccagaagatcttttctgccagaccttgcgaaatacccggcacttttgcaatttcctcgacgctggcgttacgtaaaccttgcaaaccgcccatatatttcaacaacatttgccgacgttttggcccgacgccttcaatggtttccagggaactggtatttttgaccttcgcccgttttttacggtgcccgccaatcgcgtgatcatgtgattcatcgcgaatatgctggataacatgcagcgcgggtgaatctggcggcaaactaaatccctcaccttccggctcaaagaacagcgtttccagtccagccttacgatctgctcctttggcaacgccaagtagcagcggatgatttttatcccatgagacatccagttcggcgaagacatttttcgcctgcgcaagctggcctttgccgccgtcgataaggatcacatccgggatcttactgtcgtcaatggctttaccataacgccgacgcagcacctgattcatcgccgcataatcatcgcccggcgtgatgcctgtaatgttatagcgccgatactccgcacgcagcgggccgttagcatcaaacaccacacaggaagcgacggtttgttcgcccatggtatggctgatgtcaaagcactccatccgcttcacttccggcaatttcaacacgctggcaagcgcggtcagtcgctggtgaacggtagattgctgcgaaagtttgctggttaaggccgtcgccgcattggtgcgcgcgagtttcagataacgcgccctatcgccgcgaggtttggtttgaacattaatcttgcgtcccgccagttctgaaagggaatcggcgagcagcgttttatcgctaagattaaaatcgagcaggatctcacccggtaaggtgcgcatctggctgccttgtaaatagaactggcctacgaaggtttctaccacctcgctcagttccgtaccgccaggcactttcgggaaatagctgcggctgccgagcactttgccctgacgaatgaacaatacgtggacacaagccatgcccgcatcgaacgccacaccaataacgtcgaggtcgtcgccggtattggaaacgaattgtttttcggtgacgcgtcgcaccgcctgaatttggtcgcgaatacgtgcagcttcttcaaactccagattctggctggcagtttccatacgactaatgagttgcgtaagcacctgatcatctttgccagacaaaaacaggcgcacatactcgacctgctgagcgtattcttcttcactcaccagtccttcaacgcacggtcccagacagcgccctatctggtattgcagacacggacgcgagcgattgcgataaacactattttcgcactggcgaatggggaaaatcttttgcagtagcgccagtgtttcacgtacggcatagccattcgggaacgggccgaaatattcacctttggcatgcttcgcaccacgatgcatcgccagacgcgggtgggtatcaccactcaggaagataaaaggatatgatttatcatcgcgtagcaaaacgttgtaacgcggctgatagagtttgatgtagttgtgttccagcaacagcgcttcggtttctgtgtgagtaaccgttacatcaatttgctggatctgggcgaccagcgcttcggttttgcgcgaagcgaggttgctacggaaatagctggaaagccgttttttcaggtctttcgctttgccgacatagataaccgtaccaccagcatcgtacatgcgataaacgcctggctggctggttacggtttttaaaaacgcttttgcgtcaaactgatcactcactgacttgataatgtctccgcattacacagaccatggcgaattgccaggtgagtcagctcaacatcgccatgaatgtttagtttactgaacatacgatagcggtagctgttcaccgttttcggactgagattgagctgttctgagatctcattgaccttctggcccttggtgatcatcagcataatctgcaattcacgttcagacaaactggcaaatgggctttctgttttttctggttcgatctggcttaacgccatttgttgagcgatgtcagaagcaatgtaacgctgccctgaatagacagaacgaatcgcactcacgacttcctgcggagccgcgcctttgctgaggtagcccgcagcaccggcctgcatgactttcgctggtaaagggttttctgtatggacggtaagcatgatgattttgacatcagctgtggaacgcgcgattttacgcgtcgcctcaagaccgccaatgcccggcatactcatgtccattagcaccacgtcaacggcatttgtccggcaccacttaacggcgtcttcaccgcacgatgcctcaccgacgacttttataccctttatatcttccagaatgcgtcgtatccctgcgcgcaccagttcgtggtcatcaacaagtagaacgttgatcaaaggaatatctccagaaatagggataacgctactgatagttagtcattcgtatattagcggtttttattgcaactttgaaacgttaaaaatggtgggtattcgatttttctctcgtttttgtcaattcgattgtccacagttatggtcacgcccgtcaccaacggcttaccggatcgtttcacagtaagccctgcgacgaaatgtgacaaaaattacctttattcagcaaaaatgaaaatcagcccgctgaatatgtaacattaattaacccgaacaatacgggcaaaaaacattcatgataaaaatatttattggtcattatattaacgcatttaatagcaccgttgacgatacgctcaaaaaacaaccactgctatttttagcaaagcttatggtatactccgccgccttaacatttttcaccgcaaattttcattgcaacatgacgaggaaaataaatgagtacgcctgatttttctactgccgagaataatcaagaactggcaaatgaagtctcctgcctgaaagcgatgctgacgctgatgctgcaggcgatgggacaagctgacgcgggccgcgtgatgttaaagatggaaaaacagcttgcgctgatcgaagacgaaacccaggctgcagtattttccaaaacggttaagcaaattaaacaagcctaccgtcagtaatataaaaccggctgatagcgtgcctttcagccggtttttgcatctggcacgcaggacagaaaagagatcaaattaagccagtagcggccgcgtaacaggcaacctgggtcttattcggtgcattgatttttttctgcatgtttttctgatggaaattgaccgtattctcagagattgacaaaatcatcgctatctctgctgatgtcttcccttccgccgtccatttcaaaatttctttttcgcgcttgctgaaattcatctctggcgtcatcactatttcatcatttaaacgcatcagagccatcagactttcgcgcaccagtaactgcatttttaattgcagttcatcactaagaatgggtatttcgcgcgcgctgctacgggaaaaggacaaaaagcccagcgcccggtttggcagcattaaatactgagtgacaccgcggcgtaaaccatgtgcgcgcgcggcttcccataacggctgtgcttcgctgaataagtcatcattccacattaaatggccctgactaaagttttcagggttcagcaccggatcaattgcgagaaagttttttgcctgataataactaacccacgcctcagggtaattggtgtagaaagccactttaggtcgcgtgaatggtaccgggtggcgaacacataacgaatagtaatcgtactctagctgctgagcctgaagctctatttcatggtagacctcttctgcggcctccatcctctgaaaacgcaacagcatcgtgcgacgccagctgaaaaaatccgtatcctgcatagtaaaccgcaacgcccctgagagtgagtatcatttataatgataattcaaactatcacataaataagatttatatataatttatattattcaggcaatgaattacttttgcaagccatcgcattctcttatgttattaatgagttatgctgatttgttaagctgttttatcacgcttgaaatggcgtcccgccccgacaggtgaatcgtcggggctgattttttcttattattgcagcagaaacttctcgaggaactggcgggtgcgaggctgctggggatcggcaaataacgcttttgctgccccctgctcgactatccgcccctggtccataaaaatcgcccggtccgcaacatcccgggcaaagctcatttcgtgcgtcacaatcaccatcgtgcgcttttcctgcgccagctgacggatggtgttcaggacttcgcccaccagctctggatccagcgccgacgttggctcgtcaaacaaaatcacctcaggacgcattgccagcgcacgtgcaatcgcaacacgttgctgttgaccgccagacaaacgacgtggatagctggtttctttaccggccagcccaactttcgccaacagctcgcgagcgcgcgccgtggcctcttctttcggttcgcctttgacgatcaccggcccttcaataatgttttccagcaccgtacgatgcggaaacaaattaaagttctggaagacaaacccgacgtgctgacgcaactggcgaatcagcgatttttgctgacttaatgaacgtgcagtatcaatagtgatatcgccaacggtgatagttcccgcttccggttgttccagcagatttatgctgcgtagcaacgtggttttgccggaaccactcggaccgataattgccaccacttcgccaggctttacctcaaggtcgataccgtgcagcaccgtctgaccgtgaaattttttcaccaggttcttaacttcaatggcactcattttggttctctctcctggcgattaagttgattctcaaaatggttctgcaacgtcgataatactgtcgccatgatccagtagatgagcgaagccgccaggtacatggtgaacacctccagcgtgcgcgaggtaatcaactgcgcctgacggaacagctccggcacctgaattgtcgcggccagcgacgtatcttttaccaggctgataaagctgttcgacagcggcggcaacgccacccgcgccgcctgtggcaaaatcgcgcgacgcatagtctgccatggcgtcataccaatactggcagctgcttcccactgacctttatcaatagaagaaatggcggcgcgcagcgtttcggcagcataggcggcagtgttgagcgacagaccaatcattgctgacggaatgggatctaattcgataccaaactgcggcaggccgtaatagatcataaacagttgtgcgatgagcggtgtaccacgaaaaatagagatataaaaacgcgccagccagcgcacgggccagattggcgacaggcgcatcagcgcgagaataaacccgagcagtaagccaaaaaacatgccgccgatactgagttgcagcgtatacccagcccctttcagcaggaacggcaaggaatcaataaccagttgtatactttcttgcatgagcgttcccggagctaaacgtggggatgataggcgaacagcgcaggcgcaccgccggtatgaataaacagaatcggcccttcatctttgaaacgtttctgactgataccgtcaatcagacccgccatcgcttttccggtatacacaggatcaagcagaatgccttccagccgcgccagcaatttcactgcttccatgccttcgtcgttcggcacgccgtagccaggtgcaaaatagtcatcccagagtaaaatttccgctgatgcggtcagctccagttctttcgcaatcgcctgttgtaggttaaccactttcggcaattgatcggcaacggaacgcgacacggtcacgccaatcagttcgctttcaggcatcaggtgttccagcccaacagccagtccggcgtgagttccggcactgcccgatgcgaccaccaccgacgaaatattaaccgccccttcacactgttgcgcgatttccagcgcactctccacataacccagcgcgcccagagcattagaaccgccaaccggaatgacatacgggcgaaagccttgtgcttcgactcgcgtcgccagctcttccagttgggcattgggatcggtcagtgcgtcgcacatttcaatctgggtattgaacagatccagcaacaagcgattgccgttggttaaatagttttctgcggttgtgccaataggattttccagcagcgccacgcagtgcagaccgagtttggcagcgactgcggcagtctggcgcacatggttagactggatcgccccggcagtaatcagcgtatcggcaccttcgcgcagagcatctgccgcgagaaattctagcttacgtaatttattgccgcccattgccatgggggtgacgtcatcccgtttgatgaaaatttcccgtcctagataatcagaaaagcgcggcagatattcgagcggcgttggcgcgccgataaactccaaccgtggaaaacgggttaaattatgcagtggcataacagcctccgatgtgtgttgttgtgattttcttattatgcacgctgaaaacgcgtaaataaaaaaggcgctagtgaaagcgcccttttttgtcattatgctgattatttggtcacatcagcaccaaaccatttttcggaaagcgcttgcagagtgccgtctttttgcatttccgcaattgcatcattcaccgctttcagcaggtcttcatttcctttacgcagcgccacgccagactcctgacgggagaatgcttcaccggttactgccagcgtatcgttggttttcttcaccagatccagcgccgccagacggtcaacgaggatcgcatcgatacggcctacgcgcagatcctgatatttggtcgggtcatcatcataggtacgcacatcgacaccctgaacattctgccgcagccactcttcatagttggtgcccagaccgacacccacttttttgcctttcagatcagcagctgttttaatggtgccttcgttaccttttttcaccagcgcctgaatgccggaaatggtgtaaggggtagagaaatcgtattttttcttgcgctcgtcagaaatggtgacctgattaatcaccacatcaatgcgtttagaatccagcgacgccagcataccgtcccatttggtcggttttagggacgcctcaacgccaagatgttttgccagctgttgggcaaattccacttcaaaaccggttaatttgccgtcatccccctgaaaactgaacggcggataagttccttccagacctaccagcagcgtgccgcgctctttgactttattaagcagaccttcatctgcaaaacttttaacgctcatgcccgcaaccagcgccacggccatcacacccatcaatgcctgacgtcccagatgtgctaatttcatattcaccccgaatgttgttatgtctgtttgcagtgtagagccattgtttgtaaacacaaaaacaactccgctacatcttattcttatttaatatatatcagaagaaggcaggctggaggatttctgcacaagtccggtacaggtttggcgctgatagtgttgatacttccgtaacgcgatgcggtaattgttggtgctggtggtgggcagccacggggcgaggatttcatcaaggaaaccgtcctgcagctgttcgagggaaatattttgctcgtgtagatgattccccaaacggcgcaaacgaacgacatattcacgcaccgtacctgggctcatttcagtttgctcaaaaagaaattgcttaaagccgataatatcgaaaaaatcactctgcgttttgcaatgtaaatcaccgcaaaatcggcacaatgccgcccatgatttttgttccgtttgccagccattttcatcaagcagcgcgtccaggcgggaaatctcgattttattcactattttgccgtcgcgaacgagggtaatgcgatcgagtaatttacggcaatgcgcgcaatgagtctggctgtgtttaaagtctttaagatagcggcttaatggccgtcttttcaggtgctgcaccatcattaagaactcctggtagtcaaaattaaagtgcggcatttactgacgttataacttacccagtttagtgcgtaaccgtttaatggcctggctgtgtaactgactgacccgcgattccccgacctccagcaccgcgccaatctctttgagattcagctcttcctggtaatagagggttaataccagtttttcgcgctccggcaacgtttcgatagcttccatcacccgctggcgcagattactgtccagcagttgttgtagcgggttttctcgctatgatcatcagtaaccagttcgatgctatcgccgtgctcttcgcgccactcatcgtaggagaagagctggctgttattggtgtcgagcaacatttggcgataatcggcaatatcgatccctaaacgttccgcaacctcagtttccgtggcgttgcggccaagttcctgctccagttgccctattgcctgtgccacttcacgcgcgttgcgtcgcacgctgcgcggcacccagtcacggctgcgaagttcatccagcatagcgccacggatacgctgcactgcgtaagttgtaaatgccgttccttgtagggcgtcatagcgttcgacggcattaagtaacccaatgccgcccgcctgtagcagatcgtcaagttccacgctcgcgggcagtcgaacctgcaggcgcaatgcttcgtgacgcaccagcgggacataacgctgccacagcgagtgtttatccattacaccttcagcggtatagagtgaattcacgataaacagccctgcgttatatgagttatcggcatgattatccgtttctgcagggtttttaatcggacgattagtgggtgaaatgaggggttatttgggggttaccggtaaattgcgggcagaaaaaaccccgccggtagcggggtcaggcaggttaaggccattagccttgtaacagagacagaacttgctgcggtacctggttggctttagacagcacggagttgcccgcctgctggataatctgcgctttcgacatgttggacacttcggtcgcatagtcggcgtcctgaatacgggactgcgcttcagacaggttggtggtggtgttgttcaggttggtgaccgcagaatccagacggttttgaacggcaccgagggaggagcggaatttgtcgactttagcgattgcggcatccagtgcttttaacggatcggctgtagcggctcccgccacttccgctgcaccaacagttaccgccgccgccgtaccggtaatggctacagtggcttccatgtatttaccggttgcagaatcaacgaccgcatatttagtacttttagacgcggtgtcagtgtaagacagtaaattggcttgtttacccccagcatccttgacatccgcagcagcaattgctgtaccatcagcagccgtcagtttcgccgcgctgaaatccgccatgccggacacggtaaatcctttcagattcaaagtggtactgtcgatttgttgcaagccaatgctgatcgtctggttatcattggcaccaatctgaatcttcatcgaatcgtttttcgacagcacgttcacaccgttgaactgggtctgaccagatacacggtcaatttcatcaagacgggatttgatttcgtcctgaatagaagacaggtcggaatcagagttcgtgccggtagaggcctgaacggtcagttcacgaatacgctgcaagttgttgttaatctctgacagcgcgccttcagccgtctgcgccagagaaataccgtcgttggcgttacgtgcggcctgagtcagacctttgatgttagaagtaaagcggttagcaatcgcctggcccgcggcgtcatctttagcgctgttaatacgcagaccagaagagaggcgctcgatagaagtcgacagcgcagactggtttttgttgatgttgttctgagtgatcagcgagaggctgttggtattaatgacttgtgccataattcattttcctgttttcaagtctacggtttaagtattgggcttccacccttcggcttcgtcgccgtcaaccctgttatcgtctggtcactcacaacctttagaatttttttctagcggtcgaaatactccccttcctcgttgctgttcgtgccattaaggcaaaaaataaatcgtaaactttaccccgcttacgccgataaccccggtattcgttctatacacgtcgcatgattaaggaaactatatggctagtatttcaacgcttggggttgggtcggggctggacttaagcagcatccttgacagtctggaggcggcagaaaaatctaccctgacgccgatatcaaaacagcaaagctcttacaccgcgaaactgagcgcctacgggacgctgaaaagtgcactagagagtttccagacagccaacacagcactgaataaagccgatttatttaccgccacctcaaccaccagcagttcatcggctttcagcgccaccaccacgggcagcgcgattgctgggaaatacaccattagcgttagccaactggcgcaggcacagacgctgacaacaaaaaatagtcaaaaagacagtaaagccgccatcgccaccagcgatagcgtactgaccatccaacaaggcggcggtaaagatccggtcacgattgatatcagcgcgggtaactcgtcactttccggcattcgcgatgccattaacaacgccaaagctggtgtcagcgccagtatcatcaatgtgggaaacggcgaatatcgtctgtccatcaccgctaacgatacgggcagcaataacgctatgaaacttagcgtcagcggcgacagcgccctggaaagttttatgggttacaacggaacgccgggtgatagcagcaatggcatgattgaaagcgtcaccgcgcaaaacgccaaactgacagtcaataacgttgagattgaaaacagcagtaacactatcagcgactcactggaagatatcaccctcaacctgaatgacgtcaccaccggtaatcagacactgaccatcagtaaagacacatccaaagctgaaaatgcggttaaagcgtgggtggatgcctataacacattgcaggatacattcagcagcttaaccaaatacaccgctgtcgatgccggagctgaaagtcaggactccagtaatggcgcattactcggtgactccacactgcgtaccatccagactcagcttaaaaccttgctcgccaatactcacagcagttcaaactataaaacgctggcacagattggcattaccagcgatgccagtaccggcaagctggaaatcgcgaccgacaaactgcaaacggcgctaaaaaatgatgccgctggtatcggtgaaatgtttataggtgacggcaaaagtactggggtaaccaccggcattagtaacaacctgaccagttggctctcttccaccgggataatccaggcagcaaaagatggcgtcagcaaaacgctgaataatttgaccgaccagtacaacgcagccagtgaacgtatcgataccttaatgacgcgctataaagcccagttcacccaattagatgtgttaatgaactcgctgaactccactagtagctatctgacacagcagttcgacacctcaaatagcaactcgaaataatcttcaggagagactatgtacgcggcaaaaggcacccaggcctatgcacaaattggcgtcgaaagcgccgtaatgagcgccagccaacagcagctggtcaccatgctatttgatggagtgctgagcgcactggttagagcgcgcctgtttatgcaggacaacaatcagcaaggcaaaggcgtctctttatcaaaagcgatcaacatcattgagaacggactgcgggtgagtcttgatgaagagagcaaagacgaattaacccaaaacttgattgctctttatagctatatggtcaggcgcttgctgcaagccaatttacgtaacgatgtctccgcagtcgaagaagtggaagcattaatgcgcaatattgccgatgcctggaaagagtctttactctccccttctttgattcaggacccagtctgatgaacaatgcaccgcatttgtatttcgcctggcaacaactcgtcgaaaaaagccagctcatgttacgcctggcaacggaagaacaatgggacgaactcatcgccagcgaaatggcgtatgtgaatgcggtgcaggagatcgcacacctgactgaagaggttgccccgtccactacgatgcaggagcagctccgcccgatgctgcgcctgattctcgacaacgaaagcaaggtaaaacagttattacagattcggatggatgaactggagaaactggtcggtcagtcatcggtgcaaaaatcggtgttaagtgcctatggcgatcagggcggctttgtgctggctccgcaggataacctcttttgaatcttaatgagccgatggctcgcgaataatccgattacggctacgcttctaatattccccttgaatggagtcgaagaatgcgtaatcccacgctgttacaatgttttcactggtattacccggaaggcggtaagctctggcctgaactggccgagcgcgcagacggttttaatgatattggtatcaatatggtctggttgccgcccgcctataaaggcgcatcgggcggctattcggtcggctacgactcctatgatttatttgatctaggtgagtttgatcagaaaggcagcatccctactaaatatggtgataaagcacaactgctggccgccattgacgccctgaaacgtaatgacattgcggtgctgctggacgtggtagtcaaccacaaaatgggcgcggatgaaaaagaagctattcgcgtgcagcgtgtaaatgctgatgaccgtacgcaaattgacgaagaaatcattgagtgtgaaggctggacgcgttacaccttccccgctcgtgccgggcaatactcgcagtttatctgggatttcaaatgttttagcggtatcgaccatatcgaaaaccctgatgaagatggcatttttaaaattgttaacgactataccggagaaggctggaacgatcaggttgatgatgaactcggtaatttcgattatctgatgggggagaatatcgattttcgcaatcatgccgtgacggaagagattaaatactgggcgcgctgggtgatggaacaaacgcaatgcgacggctttcgtcttgatgcggtcaaacatattccggcatggttttataaagagtggatcgaacacgtacaggaagttgcgccaaagccgttgtttattgtggctgaatactggtcgcatgaagtcgataaactgcaaacgtatattgatcaggtggaaggcaaaaccatgctgtttgatgcgccgctgcagatgaaattccatgaagcatcgcgcatgggtcgcgactacgacatgacgcagatcttcactgggacgctggtggaagccgatccttttcacgccgtaaccctcgttgccaaccacgacacccaaccgttgcaagccctcgaagcccccgtcgaaccgtggtttaaaccgctggcgtatgccttaattttgttgcgggaaaatggcgttccttcggtgttctatccggacctctacggtgcacattacgaagatgtcggtggtgacgggcaaacctatccgatagatatgccaataatcgaacagcttgatgagttaattctcgcccgtcagcgtttcgcccacggtgtacagacgttatttttcgaccatccgaactgcattgcctttagccgcagtggcaccgacgaatatcccggctgcgtggtggtcatgtcgaacggagatgatggcgaaaaaaccattcatctgggagagaattacggcaataaaacctggcgtgattttctggggaaccggcaagagagcgtagtgacagacgaaaacggcgaagcgaccttcttttgcaacggcggcagcgtcagcgtgtgggttatcgaagaggtgatttaaatccatccccggcggcaagccggggagatttcattacggcagtggcgtcggtaacggcgctttatccagcgcggcggcacactctgccgtcgggcgatccacacgctccatcgtcataccatcgtactcaatggtgttaccgtcacgctcaacctcgtacagctcacgttttacggtaacgttagtgagatcatcagacatcaatgtcaacttacccggcacggcaatcacccgctgccactgacggcaatccaaggtatcgccctctttagtgacaatgaggctgcctatcgcttccggactgaccaacgcacgttgcggccctttggtctgccagtagcccgccagccagtccggcgcgggggttttcacgacattgttatagttttcgacttcggcacagcccgccagcaacatgagcgcacctgcaattgcgagttttttcatcattcgtcctgcatgagaagaaaagaggattgtggcattaaagccctgatgtcgccagcctttccaggttcagagagaaatttgatctaaccattatttttgtgaattattaccccgaaaataaatttgcatggtgtatgattcgcgactcttgtttcaaaccttctgagttcagaggctacattcatgtcatggcagcaattcaaacacgcctggttgattaaattctgggcgcccatccccgcggtcatcgcggcgggtattctctccacttactattttggcatcactggcaccttttgggctgtcacaggtgaatttacccgttggggcggtcagctcctgcagttgttcggcgtccatgctgaagagtggggttattttaaaattatccatctggaaggatcgccattaacccgcatcgacggaatgatgatcctcggtatgtttggcggctgttttgccgcagcgctgtgggccaacaatgtcaaactgcgcatgccgcgcagccgtatccgcattatgcaggccatcattggcggtattatcgccggttttggcgcacgtctggcaatgggctgtaacctggcggcgttctttaccggaattccacagttctcgctgcacgcctggttctttgccatcgccactgccattggttcatggtttggcgcgcgctttacccttctgcccatcttccgtattcccgtgaaaatgcagaaagtttctgctgcctcaccgttgacgcaaaaaccggatcaggcgcggcgtcgttttcgtctcgggatgctggtctttttcggcctgctgggctgggcgctgctgacggcgatgaaccagcccaaactggggctggcaatgctgtttggcgtcggctttggtttactgattgaacgtgcgcaaatctgctttacttcggcgttccgcgatatgtggatcaccggacgtacccatatggcgaaagcaatcattatcggtatggcggtaagtgccatcgggatcttcagttacgtacagttaggcgttgaacccaaaatcatgtgggcgggaccaaacgcggtaattggtggtttactgtttggttttggcatcgtgctggcaggcggctgcgaaaccggctggatgtaccgcgcggtagaaggccaggtgcactactggtgggtcggtctgggcaacgtgatcggctcaacgattctggcgtactactgggatgatttcgctccggcgctggccaccgactgggacaaaatcaacctgctgaaaacctttggcccgatgggcggcctgctggtgacatatttgctgttgtttgctgctctaatgttgattattggctgggaaaaacgcttcttccgccgtgcggcaccgcagactgctaaggagatcgcatgaaaaatatcgttcctgattaccgtcttgatatggtgggtgaaccctgcccttatccggcagtcgcaacccttgaggcgatgccgcagttaaaaaaaggggagatcctggaagtggtgagcgactgtccgcagtcgatcaataatattccactggatgcgcgtaatcacggctatacggtgctggatattcagcaagacgggccgaccattcgttatttaattcagaagtaatccctcattcccgctgtggcccacagcgggaatatcgttgcctctctatcacatagatttaacccgccccctctcctattcttttcagtgtgacctcaggaggtttctatgtgtggacgctttgcccaatcccaaacgcgtgaagattaccttgcgcttctcgcggaagatattgaacgcgatattccctacgatcccgaacctattggcagatacaacgtcgcgccgggaaccaaagtccttctgctcagtgaacgtgatgaacaccttcatctggatccggttttctggggatatgctcccggatggtgggataaaccgccgctgattaacgcccgcgtagaaactgccgcaaccagtcacatgtttaaaccgctctggcaacatggtcgggcaatctgttttgccgatggctggtttgagtggaaaaaagaaggcgacaaaaagcagccttattttatctatcgtgctgatggacaagctgtttttatagccgcgataggtagcacaccgtttgagcgtggtgacgaagccggaagaagtttttgtaagcccgctcagggtctttcagtgactgttgcaatggctgtgagggcgaatctttaagccattgcgtttcagtggcatttttccactcaaccaaccaggaagccattttcccgtaagggatgtatttattaccggcctcatgattctcattctgaagctccagagcacgattgaaaacgaaacgacatgcgcctgcgaagcgcctcatttcacgctcctgttgaccacctggtcttaaccggaatttgaatgcctgtagtcgtttcatgggccaaatcatactttggcccatgaaaaaagaaactgatatccgacgcggaaggcattgtgttttcctgaagcatgttcacctagtcttcgttactaaataccgacgtcagatttttgaccatgacgcgacagaaaaactacgcacttacttttcaaatgtatgtgctgattttgaagctgaacgggttgaaatggatggcggaccagatcacgtccatttgttaattaactatcctcccaaactggcgatatccagtctggtaaacagcctcaaaggcgtatcgagtaggttactgcgacgagatcgaccagatattgcagtcaggtattacgacaaaggcgttttgtggagtcctggctattttgtcagtagctgcatcttaacgtatcaactagatttaataacaacgatatccgtacctaaccggatatctaatgtcataagcatccctttaattatcccctcaacctcttgtaactttcccactcttgagctccacatagtccaaacgccgggtaatgactccaacttactgatagtgttttatgttcagataatgcccgatgaccttgtcatgcagctccaccgattttgagaacgacagtgacttccgtcccagccttgccagatgttgtctcagattcaggttatgccgctcaatgcgctgagtataacgcttgctgataacgtgcagctttcccttcaggcgtgattcatacagcggccagccatccgtcatccataccacgacctcaaaggccgacagcaggctcagaagacgctccagtgtggccagagtgcgttcaccgaagacgtgcgccacaaccgtcctccgcatcctgtcatacgcgtaaaacagccagcgctgacgtgatttagcaccgacgtagccccactgttcgtccatttcagcgcagacaatcacatcactgcccggttgtatgcgcgaggttaccgactgcggcctgagttttttaagtggcggaaaatcgtgttgaggccaacgccaataatgcgtgcactggcgcgacatccgacgccattcatggccatatcaatgattttctggtgcgtaccgggctgagaggcggcgtaagtgaactgtagttgccatgttttacggcagtgagagcagagatagcgctgatgtccggcggtgcttttgccgttacgcaccaccccgtcagtagctgaacaggagggacagctgatagaaacagaagccactggagcacctcaaaaacaccatcatacactaaatcagtaagttggcagcatcacctattggtcagaaaaaatttattgataagttctaaatcgattaaaccggaatctctcgacgatatccttggcgatattctgaaaaaagagacaacgataacctcttttttaaatatgccgacgttatcattgagccgaaccgaatcgagtatgttgcgaatgtggatggcaggtcagggaaccattcaaatctctgaccaaatgaatatcaaagccaagaccgtttcatcgcataaaggtaatattaaacgtaagatcaaaacgcataataaacaggttatctaccatgtcgtccgactgacggataatgtgactaatggtatttttgtcaacatgcgctaacacattctgactggtggtttcccaccagtcaggctgaataagattactctgctttctccacaaagataccgtcctgatgccctgcttcattaaagaaccagatgccgagcgggtagtgttccagcgaaaccaggtacattgtgccttcactaaactcctcaactgccagtaccacgccaggacgacgcggaccgccatccgttttgactgttacccgatcattcaccttcatcgttttcctcctgtggctttgtgccagtgtagaacaatttcgtttttctggcagcgccaggcgcgcgcgagtgttgattttctcgacggtctatacttaagagatgccaggcggacttaacgactggcggcaacaacagagtaacggttgcgaggaaagatgatgaaaaccgcaaaagagtacagcgataccgcaaaacgtgaggtcagcgtcgatgtcgatgccctgctggcggcgatcaatgaaattagcgaaagcgaagttcatcgcagccagaacgattctgaacacgttagcgtcgatggacgtgaatatcatacatggcgtgaattggcggatgccttcgaactggatattcatgacttcagcgtctctgaagtgaatcgttgaatgcacaataaaaaaatcccgaccctgagggggtcgggatgaaacttgcttaagcaagaagcacttaaaaaattcgttacaccaggaaatctgatgtgttcatcaccttatccgcaatttttttcgctgacaagaaaatattcgcgatatgaatgattaacgctacttatgaatagaaatgtgacgtgcgtcaccccttggtggctctggcgtcaacgggatcgctcccgaaaaaatcatctttgattatttgtgctgttttgagaatcatcctggtaaggggagaactgcgcgaccatgttttcaattcaacaaccactactggtttttagcgatcttgatggcaccctgctggacagtcatagttatgactggcaaccggctgccccctggctcagccgtttacgcgaagcgaatgttcccgtcattctctgtagcagtaaaacttcagcggaaatgctgtacttgcaaaaaacgttggggctacaagggttaccactgattgccgaaaatggcgcagtgatccagcttgctgaacaatggcaggatatagacggttttccacgcatcatctcaggtattagccatggcgaaatcagccaggttttaaatacgctacgcgagaaagaacattttaaattcacgactttcgatgatgtcgacgatgcaaccatcgccgaatggacgggattaagccgtagccaggcggcgctgacgcagctgcatgaggcgtcggtaacgctaatctggcgcgacagtgacgagcgtatggcacaatttaccgctcgtctgaacgaactgggcttacagtttatgcagggtgcgcgcttctggcacgtcctggatgcctctgccggaaaagatcaggccgccaactggattatcgcgacctatcaacaattatcaggcaaacgcccaaccacacttggcctgggcgatgggccaaacgatgcgcccttactggaggtaatggattacgcggtgattgtgaaagggctaaaccgtgaaggggtgcatctgcatgatgaggatccgacccgcgtctggcgaacgcagcgtgaaggaccggaaggctggcgtgaagggctggaccattttttctccgctcgttaagcgttatcgctcgcgcatacccgattacgcccggcctgtttagcgagataaagccgacggtcagccagtgactggagttgttcaaaatcataatcaccggtttcctcgctgctactaacccccaacgaggcactgatgcgtatcgtcgtactcttagcaatcaacatctctttttcatttaacttcaggcgaatacgttctgcgacttccgcagcctccgtcagactcgcgcctggcagaatcacacaaaactcctcaccaccgacccgcccggcaacgtcctgcgcacgcaaggaactgctaattaatccggcagcatgagaaagaacacggtcgcccgcctgatgaccaaagcggtcattaatcgctttaaaatggtcaaggtcgacctgaatgacagaaaaaggatgttggtgcgtctgacacaatttcgcgagcggacgggctttttcaaacagtgcgccacgattatataaacgggttaaggtgtcgtgccacgcctgccactgcaacgagctttgcagaacatacatgttgctaaccatccggcgaatcacataccaggagatgagtaacatggtggtaaagagcgcccacagcagggttaatgcaatgctgatactgccgaaatcgccgcgcacgccttcgcttagcgtatggacgcgcaccagcacaccgtcgaaatggtccagacgttcccagctaacatagcgactgtccatacgaatgccgccccgcgtgtcatgttccatcgcctgcgccagcaaggccagttcacgaggatcaaaaatattccctgttggatggtcaggattggaagaggtcaaaaatctcagcttactgtcatagagctgatactcaccatcgaggtttttatcgatggcgtttcttaaaaattgctgcatggtacgcacgggaatactcatccccagcacgccataccagtagttattactgtctaccggaacactgacggtaacctgcggttcagtattgctggcgtgttccggttgcgaagtgaaccagcgtaccgcgcggtgacgattttctcgttgtgaatggccgataaaccagggttgggtgacatagccgtaataacgcgttggaacattgcgcgtaaacaaggtcggctgcgtcgaaacgtaaaatccggcacgcgagacatacatcgcctgttcaaccatcgacgaggagttgtgcgccagtcgcagcaagtaaccaacttccagtgcagcggtaatttcattgtcgaggctttcattttcgcgagacaggagatttccctcgctgactaatgcatccgatacgccattgactggcagggtgcgtcgtcggttgagttcgattttccaggcgtgctcgtcgcgatgctgttcgaactcggttacagcatcacgcagagaggtgaaatccagtggcgctacgagagcttcgcgcatgccattacgcaaaaagatcagtttgtcgacgttatactgcaaatgcttatcgagcgcgttggctacgttttccagatgattacgctggctggagatagatataggcatcttccagcactaccacttcacgccaggtgagcaaggtggaaaaaagcaataccacgataaagcagagattaacgacatgaccaggccccaggcggcgtgcgagttttttcaaccagctctggttttccatttttgtctcgtgctgcaccctgacgactcccaacctgcttttttatgattctggcataacctggcgatagcgtaccgcaaaacagcgataattttataatggtggcatgataagacgcgacagacatcgatagttttataacgtaggcatgataagacgcgatagcgtcgcatcaggcaattcagtgcagacactggcacacccgaccggatgcgacgtgtgcgccacatccggtcgggtgttaatgataccctttcaaacttcttccgcagaacgactcccctcccccggaacaagctcggtttcatgaaaagcttcccgcttgaccccgtaaccgtcataccaacgacactcaaccataccgctggagtatccggtgacaatcatccgcgggccgccctctttaaccgtaacttcctcactaaccataaagctcatactcgcctccttttttcgagtgaaacttgttcaccttagttgaagatggcgaattttgcataatagcctgtgcgagtattaatgtgcctgaccgcgtattttcgctacggctttcactcccagcaccacgatgccgccgatgataaatccaagaatcagatttaaaacagtcggtaatatcatcgccaccactgcactttgctgcccggcgaaatgttcaatggcgtgatgcagcggcgcaattccatgtaccacaatcccaccgccgacgaggaacatcgccagcgtgccgacaatcgataacgccttcatcaaccagggcgcaatgatcaataaccctttacctaatgcctgcatcagcgcgctggatttttccgccagccaataccccaggtcatcaatcttaacgataacccctaccagaccgtagacgcccacggtcactaccagcgcgatgcctgaaagcaccagcacctgattaagcaacggcgcttcggccacaatccccagcgtgatggcgacgatttcggcagacaatataaaatcggtacgaatcgccccttttattttgtccttttcaaacttcagcggatcctgcgccgccagcttctccagacgctgctggctctgcgccggatcttctttatgtttacgcgcctccagcatatgcagcactttctctactccttcaaagcagagaaacgcgccaccaatcatcaacagaggcgtaatcgcccacgggataaacgcactgatgatcagcgccagcggcaccagaatcactttattaatcagcgatcctttcgccacgccccagaccacgggaagttcccggttggcccgcacgcctgaaacttgttgcgcattgagcgataagtcatcccctaatacaccggcggttttcttcgccgccagtttgcccatcacggagatatcgtccagcagtgtggcgatatcatcgagcaacgtcagtaaactactcccggccaaaagcattccctctcatttttattgttgaagggtgtaagtatgaagcaaaaacggcagctctgatacttgcttcacaggtcaacatttttttaacaatcaagtgcaattatatctctcgccagcagaatgattttcacgtttactatgaaccacctttttatttccaccgtgagggattatgcgtttccgccagttgttaccgctttttggcgcgctgtttgcgttgtatatcatttggggctcaacctattttgtcattcggattggcgtggaaagctggcctccgttaatgatggcgggcgttcgattcctggcagccggtattttattgctggcatttttgctactgcgcggacacaaactccccccgctacgtccgctgctcaatgccgcggtgattggcctgttattgctggctgtcggtaatggcatggtgacggttgccgagcatcaaaatgttccttccggcatcgccgccgttgtggttgcaaccgtgcccctctttaccctgtgcttcagccgcctgtttggcattaaaacgcgcaaactggaatgggtgggtatcgccattgggcttgccggaatcatcatgctcaatagcggtggaaatttaagcggcaatccgtggggcgcgattctgattttaatcggctcgattagctgggcgtttggctcggtttatggctcgcgcattaccttacctgtagggatgatggcgggtgcgattgagatgctggcggcaggcgtggtgttaatgatcgcgtcgatgattgcaggtgaaaaactgacggcgctcccttccctttcaggcttccttgcggtcggctatctggcgctgtttggttcgattatcgccattaacgcttatatgtatttaatccgtaatgtcagtccggctctcgccaccagctacgcctacgttaacccggtggtcgcggtcttgctgggtacgggactgggcggagaaacgctgtcgaagattgaatggctggcgctcggcgtaattgtcttcgcggtggtgctggtcacgttgggaaaatatctctttccggcaaaacccgtagttgcgccagttattcaggacgcatcaagcgagtaaatgaatcccctgcgtgtcgatctgcgcgctggcaccttcgccgcagatccactcttccagacgctcggtaagcgcttcatccgtcagcttctcgcgcccacgtaatgcacactcccagacaatcagtacgcgccagccgagttcctgcaaacgactgatatcgcggcgatcgcgttcaacatttttacctatcttctccagccagaactcggttcgagtcgcaggcactttaaacagatagcagtgatgatgatgccagaagcagccatgggtaaatatcacgcagcgatattcatcaacgacaaaatccgggcgaccgggcagactggcgtcctgaacgcgaaacgccaggccctgcccggttaacagactggcgaggcgcttctcaatcgccgtattacgcgtggcaatcgcgcgcatatttttgctgcgagtggccttatcgtgaacgtcggccatgttgtgcctcttgctgacgcaacgccaccgtctgtttgatttttggctcaagcagttttgccaccgcggcaaagaccggcacgaccaccgagttaccgaactggcgataggcctgagtgtccgaaaccggaatgcggaatttcgcttctcccggcgcttcaaaacccattaagcgcgcgcattcccgaggcgttaaccgacgtggacgatgttgctgattcagcggatcgtcaaagtctttctcacctttggccatatcccagccgcgatcgattaaaatttccgcgccatctttgtaataacgcgcagacagcgtacgcgtgacgctttgcggattgttcggataaaccattccataaccgaagccgttaccgcgcgcctgatgttttttcgcatatcgatagaggtacttccacagcaccggcgtcaggatatatttcgcctcgaccatcgggtccaacagctgcgccagcgtcactcgctgtgcagggaaacattcgctgatatcacgcagagtaaaatcggctttcagattaagatcgcgacgaaaacccaccagcacgatgcgttcacggtgctgcggcagaaaatgtttaccatcgatgattttcggatcgtccggcccgttatcttctgcatcagccacgtcatagcccagttcgtccagcgtctgcatgatgatgcggaacgttttaccctggtcgtggcttttcaggtttttgacgttttcgagcacaaacatcgccggacgacgcgcgtcgataatgcgcaccacatcaaagaacagcgtgccctgagtatcgcaggcaaaaccgtgcgcccgcccgagcgagttctttttcgatacgccagccagcgaaaatggctgacaagggaaaccggccagtaaaacatcgtgttcaggaatgtgttgacgaatatgttccgccgccgcctcatcactcacgccttctttatggctgagggtgatatcgcggatatcttcattaaaatgatgcgtcgccggatcgcaataatggttggctttataagtgcgtaccgcatgtttgttccattcgctggtaaacacgcattgtccgccaatcgattcaaaaccgcgacggatgccgccaattccggcaaatagatcgataaagcgaaacgcataatgcggatgatgtgccggtggtttgggtaacaacgtttgcagatgggcgaactctttctcacttaaacggtgccatgccgagtcattcgccagcgcacgttttaaaattgccgcgctccagtgattctcgcccacaccattaagctgagccaccagcgttttaacatcataaatttgcagcagtttctccagcattgcctgaacgacattcccggtgctgtatgaatcggttactgatatattttcctgcatagatttaaccggccacctgagatggccgacaggttaacataattactgccgtttagggccacgcgctcagcccgcgggtgaaaacgcatctatcaccttgtgatcgacaccttcattctcccccgccagttcggcactgagcttcgccataaactcgactaaaaaatgcgcgttgtgctgcgccagctgcttgcctcttgcggtttgcatggtttgcggtagcttcagcaacttggtctggaaatgatccagcgcgtagcgtttatcatccagcgggcgatgctgtgcaaacggatcttcgccatcaaacagcgccacgcccaatgtccctgaaacagcaaacacgcgcgtcaggccaatcgcccccagggcttccagccgatccgcatcctggacgattttagcttccgttgttaaggtggcgatttgcgcgctgaaactgtgagcggcaatggcatgacaaacggcctcgattttctccgccggaaattgctcgaactcttcacggagcaggcgacgcgtctcttctgccgccaggattgaagaacgctgcctttgcggatgatttttcgccaggctcacaatatcgtgaaaataacaggcggttaaaatcaccagcatatcgacatcgtcatctgccgccagcttctgtgccgtagcccagacgcggcgaaaatgacacacgtcatgggccgcgtcctggtgctgatgatggtttttcaaccagttttcgaactgtgcctgccagtgttgtaagtccatacgcgctccgttgccaaagagtcgccaccttagcagtttttattcatagcgtctgctacgtgcgggacgaggtcgggtgtaccaggcaatgctgcctaacaatgccccgaccagagccataaataaaaatccgaccagtgcccctaaccactttcccgcggtagagcctaaatcgctttcaaatcccgacacgggggcatcggggatccggctcatcacccagatgtaacgcgccattgcccagacgaaatagccacaccatgtatagaaagcccacaaagccggtttgccgccagggctgcgagagagtctctcttccatctttgtcgaaccgtattccattttgagataacccggaaaattcagacttagtactattatgtgataaaagtcacatttttccacattggatgagccagtcaagactcaatcattttttgaacaaatagataaattttgcgcaacggcagtgaatacaggaaaaatcgttttgagcgattttatttatctttgatatcggctttattaattcatttaatcaatatattagcactgattacaattatacctttttattattctgtgtcatgatgcttccgttattagccttttatcgtcttgtttatattttttgggccggcatgatgccggcttttttttatgccttcattaatgttcgcctgatcacaccagccgtttggcgcaacaatcattgataccccctatgtttccgctcaactcataacatattgatatacatttataatttcatgaatatttatatttagaattcataattctgaattacattaaatagattagaaacattttgaaatcttttaaatacatttgttacatgcaatccttaaaataaaatgaacttcatagaatagtatccaaatgtgcttttttttggataacggcacttattgatatattcatgaagattataatcacaagggaatacataatgaaaagaaaagttctggcaatgctggtcccggcgttattagttgctggcgcagcaaatgcggctgaaatttacaataaagatggcaataaagttgatttctacggcaagatggttggcgaacgcatctggtcaaatactgatgataataacagcgaaaacgaagatacctcctatgctcgtttcggtgttaaaggtgaaacccaaatcaccagcgaactgactggttttggtcagtttgaatacaacctcgacgccagcaagcccgaaggctctaatcaggaaaaaacccgtttaaccttcgcaggtttgaaatataacgagttaggatctttcgactatggtcgtaactacggtgttgcttatgatgccgcagcttataccgatatgttagttgaatggggtggtgattcctgggcttccgctgacaacttcatgaacggtcgtaccaacggtgttgcaacctaccgtaactctgatttctttggtctggttgatggtctgaattttgctgtgcaatatcaaggtaagaacagcaatcgtggcgttactaaacaaaacggtgatggctatgcgttgtctgtagactacaacatcgaaggttttggttttgtaggtgcatatagcaaatctgatcgtactaatgaacaagctggtgacggctacggtgataacgctgaagtgtggtcattagcagccaagtatgatgcaaataatatctatgcagcaatgatgtacggtgaaacccgcaacatgaccgttttggctaatgatcattttgcaaataaaacccaaaactttgaagctgttgtacagtatcagttcgacttcggtttacgtccgtctttaggctacgtatattccaaaggcaaagatctttatgctcgtgatggacataaaggtgttgatgctgaccgcgtaaattatatcgaagttggtacctggtactacttcaataagaacatgaacgtctacacagcatacaaatttaacctgctggataaagacgatgcagcgattaccgatgccgcaactgatgaccagtttgcagttggtatcgtctaccagttctaatcagccaacgcgccgcggcgtgttactgtaaaacataacactagcctgagttcgtccctcatcgaactcaggcttttttattggcatttcatctccatctgcggcacacgcaattgccaaagcatatcgatacagcaccttaccctgcccctcctgccacaataacatctaccagcgactcttccagccaacaccccaaatgcacattctgatgaattaccccgtaacaaacacgcttcccaaatagaaatctttgcaaaaatagtgcatgaaataagctttttctctaccaatacgcgatataaatattcatcagcaccacaatattccacatcactaaatctctccccaccgccccgcatctctgataatggtctaaaatcattgaggccacttgcgacgacgttgctcaataaggaaaatttggcgtgaataatattcaacaccagtgcagcatcatcattacatacttacacccgccgactaccgctttcgatatattgactcaattttccagcctggttaaaaatagcgaccagctcagtcgcaaatatagtgactaccctaactaagcaacaataaggaatacactatgactgttcaaacaagtaaaaatccgcaggtcgatattgctgaagataatgcgttcttcccttcagaatattcgcttagccaatataccagtcccgtctctgatcttgatggcgtggactatccaaaaccgtatcgcggtaagcataaaattctggtaatcgccgcggacgaacgttatttgccaaccgataacggaaaactgttctcgaccggtaaccatccgattgaaacgttgctgccgttgtatcatctccatgctgcaggtttcgaattcgaagtggcgaccatttccggtctgatgaccaagtttgaatactgggctatgccgcacaaagatgaaaaagtaatgccattctttgagcagcataaatcgttgttccgcaatccgaagaaactcgcggatgttgtcgccagcctcaacgctgatagcgaatatgcagcaatctttgttcctggtggtcatggcgcacttattggtttacctgaaagccaggacgtagctgccgctttacagtgggcaatcaaaaatgaccgttttgttatctccctttgccacggcccggcggcttttctggcgcttcgccacggcgataacccactgaatggttattccatttgcgcattcccagacgccgcagacaaacaaacgccagatattggctatatgccaggtcatctcacctggtacttcggcgaagagctgaagaaaatgggcatgaacattattaatgacgacatcaccgggcgagtacataaggaccgtaaagttctcaccggcgacagtcctttcgcagcgaatgcgttgggtaaactggcggcgcaggaaatgctggcagcttacgcgggttaatccctgttacgtttgaatgtaagcgcataatcaatcgcagccgcgttagtactcacgacgtggctgcgttttttcatggttgatttatggcgtactgaagccctatgttaatttctttgcggtaacgtaatccggaacacattatgcttattgagatagtgatacgtagcacttcccccgtgtaattcggcaatcgctttgactaaagaaagaccaagtccctgacctacggaatgacgcgaattatctccccgccaaaatctacggaagagtttttcaggctcatgtattttcgttccaggactggcgatatcaatattaagagaaccgttggtatcaagaaaactggttatatgaatacgcgatttttctggtgaatatctaatggcattaacaataagattcgataacattcgttgcagtaaaattttatccgcaaagatttgctgattgcactcgaccttaaagcaaatctctttctcgtctgaaaggtattcaagataatccaacaaattttcgacttccttattgagagaaagcgagtccagttttaccaaaacattgtttttatctgcccgggcaagaaacagtatgttctctgttaaccgcgaaatattttccagctcttcaatgtttccggcaattgttttttgatattcagcgatacttctggtttgactgagcgtaacctgattctgacccagtaatgcattaatgggcgttctaagttcatgagcgagatcgtcagcaaactgacttaggcgttcaaaatctttgactaaagcatgatgcattttattcaacgcctgcccaagaggttttagttctctcggtaatgcgctaacctcaacaggctctcggctatcgttataattcagcgcttccgttacaccactcaactttttgatctctcgtaatcccgttctgattaacagcggacttaatactgagcacagtataatggcgacaatgcaaattataatgctattgattttatactgttcaagcatgttatgtctggctgaagccaatttagccacagtaaccgttaatgatggcgaaacttcatcaatattaattcgtaaagcatctatctctgtgtcattaataatgcttctgtaaatgccagctgcgctgattgtctcactagcaggtatgttatttaacatgccatcactgacatttgtccggttaacaattttattgataccatcaccatgaatgatcaagatatcctgactaacatccatcatccggttaaagtacacaggtaacgtatctggatttaccccatcaattaacaactgcttgatctgcgctgtccggttaatgagtgttgtatcatcgcgccatttcaactcacttgccaggccattatagagagtccagacaattccagcaccagcaacagacagtagcaatataaaaagcaaggttaaacggacggttatagacaatcttttcattatttttttaccgctacgaatgaatatcccatcccccggattgtggcaattaacttttcaggaaaaggatcatcaacttttgcgcggagcctgcgaatggcgacatccaccgtattggtatcactatcaaagttgattccccaaatttcactcgcaataaccgttctggggataatttcgccagctctggaagccagtagccaaagtaactgaaactccttgcgcgtcagtgtaatactgatattgtccctgctcacactttgactgacagagtccattcttaaaccactgatttctaatgttgaattcaaagcgtgatgttgtcttaattgtgcccgaacccttgccagcaactcagaaaatgaaaaaggttttaccagataatcatttgctccactgtccagccctctgactctgtcatcgacagaatcccttgcagtaaggcaaataacaggggtttgctttgctgttcttaacgtttgtaagatctgccagccatccatacccggaagcataatatccagaatgatcaatgcataatcatccttcagcgcaagataaagcccatctctgccatcagaaacggcatcaatgacataacccgcttcggaaagcccctgtgttacccattcctgggtcctttgattatcttcaataagtaaaatcttcatgaaaataatatgccataaatcatatgttatagaaacagcctggttcattacaaaattgtaatgctgctgtaaggttaccctggccgctttttcgctatcctcaaaactcattcacatgacaaggatataaacatgttaaagcgttatttagtactctccgtagtaacggcagcattttcattaccttctttggtttatgccgcacaacaaaacattcttagcgtgcacattttgaaccagcaaaccggaaaacccgctgccgacgtgacagtcactcttgaaaagaaagcggacaacggctggttacaacttaataccgccaaaacagataaggatggacgaattaaggcactgtggcccgagcaaactgcgactactggcgattaccgtgtcgtatttaaaaccggggactatttcaagaaacaaaatcttgaaagtttcttccctgagatccccgttgaatttcatattaataaagtgaacgagcattatcatgtgcctttattacttagccaatatgggtattcaacctatcgtggcagttaaagcataaatatgtaaaagcagatctctgctactgttagggaggacactccctgacagattaacagtaaacggctcttgctggctaacgacaaaaaagtgtgatggcttatgaaaaagaatcaatttttaaaagaatcagatgttacggccgagtcggtattctttatgaagcgtcggcaggtgttaaaagcactgggcatcagcgcagctgcactttctttgcctcacgctgcgcatgccgatctgcttagctggtttaaagggaacgatcgcccgcccgcccccgccggaaaaccgctggagttcagcaagcctgccgcctggcaaaataacctgccactgacgccagtagataaagtctccggttataacaacttctatgaattcgggctggataaagccgatcccgccgctaatgctggtagcctgaaaaccgatccatggacactgaaaatcagcggcgaagtggcaaaaccattgaccctcgatcacgatgatttaacccgtcgcttcccgctggaagagcgtatttatcgtatgcgctgcgtggaggcatggtcgatggtggtgccgtggattggttttccgctgcacaaattgctggcgcttgccgaacccaccagcaatgcgaagtatgtcgctttcgaaacaatttatgcaccggaacaaatgccaggccagcaggaccgctttatcggcggcgggctgaaatatccttatgtcgaaggattgcgtctcgacgaagcaatgcatccgctcacactgatgaccgtgggtgtttatggcaaggcgttaccgccacaaaatggcgcgccggtacgactgattgtgccgtggaaatatggctttaaagggattaaatcgatagtcagtattaagctgacctgcgagcgtccgccaaccacctggaatctggcagcgcctgacgaatacggtttttacgccaacgttaatccgcatgttgatcacccgcgctggtcacaggctaccgaacgatttattggttcaggcggcatcctcgatgttcagcgccagccaacgctactgtttaatggttacgccgaccaggtggcatcgctgtatcgtggcctggatttgcgggagaatttctgaatgcgtctgacagcaaaacaggtgacatggctgaaagttagcctgcatcttgccggattgttgccgtttctctggctggtctgggcgatcaatcacggtggactgggtgccgatccggtgaaagatattcagcattttaccggtcgcactgcactgaaatttttgctggcgaccttgttaatcacacctctggcacgctacgcaaaacagccgttattgatacgcactcgccgcctgttaggcttatggtgctttgcctgggcgacactgcatttaaccagttacgcattgctggagctgggcgtgaataatctggcgttattaggcaaggagttaattacccggccttatttaacgttaggaattatcagctgggttattttgcttgctttagcgtttacttcaacccaggcgatgcagcgaaaactcggcaagcactggcaacagttgcataatttcgtctatcttgtcgcgatcctggccccaatacattatctgtggtcagtgaagattatttcaccgcagccgctcatctacgctgggctggctttactgcttttagccttacggtataagaagttgcgttccctttttaaccggttacgcaagcaggttcacaacaaattatctgtataacttcatattgccgacaaagtacgcgttatccctgccggatgcggcgcgagcgccctatccggcctacgcagatcacatcaggttatgtttcgtttgtcatcaacctcaaattaccaacataatttatgttatttcaataagatagataatcatacctgagagaactattctcttgtctcctaagagttgttgcattttgttatatgttacaatataacattacacatcatatacaatgactctggaggaaactgttttggcgattcgtcttcacaaactggctgttgctttaggtgtctttatggttagcgctcctgccttttcgcatggtcatcactcacacggcaaccccttaacagaggtcgaacaaaaagctgctaatggtgtttttgatgatgccaatgtacaaaaccgaaagctgagtgactgggatggagtctggcaatccgtttatcctttactgcaaagtggcaaacttgaccccgtctttcagaagaaagcggatgcagataaaactaaaacatttgctgaaattaaagattattatcacaaaggttatgcgacagatatcgagatgattggcattgaggacggcattgttgaattccatagaaataatgaaacaacatcctgtaaatatgattacgatggatacaaaatactcacctataaatcaggcaagaaaggcgttcgttacttattcgaatgtaaagatcctgaaagcaaagcccctaaatatatacaatttagcgatcatataattgcaccacgaaaatcatctcattttcacatttttatgggtaatgattcacagcaatctttattaaatgaaatggaaaactggccaacgtattatccatatcagttgagtagcgaagaagtggtcgaggaaatgatgtctcattgagtattctcatgataacgcctcgatgccgctttagtaagtcatcataactgccactggtccatccacaaacgccactgaacgcaagctagctacagacacgctcatcactatgacgtgtctgtatattaataagctaacccgcattgagttaaccaataacggattccatacacaatacggccaacagagaaagatacctgtgctcacgccattgcttatattggctggttacaatgtgcactatcaattttttaaataacaaattcttaaaaccacttctgtataaggaatttttaaggttcgtgggatagcttgactgtaaaaattacaggagctacaaaaatgaaccgattctcaaaaactcaaatttatttacattggataacgctgcttttcgttgcaataacctatgccgcgatggaactccgtggctggtttcctaaaggtagtagtacttatctgctgatgcgagaaacacattacaatgcgggtatattcgtttgggtgttaatgttttcacgcctgattataaaacaccgttatagtgatccttctattgtaccaccgccacctgcctggcaaatgaaagcggcttcgctaatgcacatcatgctttatataaccttccttgcacttcctctgctggggattgctttaatggcttacagtggaaaatcgtggagtttccttggtttcaatgtgtctccctttgttaccccaaacagcgaaattaaagcactgataaaaaatattcacgaaacctgggcaaatataggttactttttaatcgcagctcacgctggcgcagcactctttcatcactacattcagaaagataatactctgttacgaatgatgcctcgccgcaaataagtcgatcccctgacaaggaaatgtgaaccatggacatcaacgcgtcataaatgtttacgcaagtgcacaatgcaccctttccactatcaacaaggaggagcagaaactgtgtaaatcgtacaatggtaagacttatcaaaaatacaggttaattttggtatttaaaccttttttacttgttagtatgatacaaaggctttcaaaaaagctgggaaattcaacaactcttggaaattatggactttgtcccgcggctttaatctgacggccgcgttccttttttgactcaattattgaccccttctctacgcaacttcagttcccaccaccaactttgcggcagtttcataggatgaatgtctaaaagaataatggtgagcgataagaaaacgactgaataactgcacatattcgctcgaaactttcctgtcagatccatagcgaatcaagtgctgaatgtcacagtatcgaacagaaaacagtgacgatctaacccatcaagaatattctacgattgttctgtttaggaaaagcaaggcgggaagtcgggagataagtcattgataaagtggcggagagagggggatttgaacccccggtagagttgcccctactccggttttcgagaccgatgatacagagtcgaaaaatcaaagagttaaaaatttttcttggaataaatgtcttaaaatcgtacacgaaaaatcaatgaattacataacattaaagaagaatattccaagccttcttgaggctaccacctgttttcaggtgtcattcagacgtgatttgccccagattgggaaagcacgcttttttctcagctatcgtcctcttattttgccgttacatttctttttgcactctaatgattaatttacaataataatatcggtaattattgagtaataataaattgattattgcaaatgtaatttaattccatcttcgcgttatattccaatctttaatctccgcatggaacaagttgcatgcgtgactatattaagacaacttataaccaccaaaacatttgctttgcaagcaaaaacagtgaccattgactctaagaaaattccgatctattgttagggtcatcaaagttacttaacagtattccgaaatgaaaatacaaagcaagctaattgtcttattaaacattattattgcatttatattatttgagcttttagctcaaaaatttggtttgagtacattattttaaagcaagataaacaatatcgggcactctagtttttataattaacaattaaacgtccatgaaatgttatttacttttcttcgctattgtcatatcttaatatagtggcttacgccactctactttcatcacattttgtacgtttatgtactcgccatgaagctctttcatggcgattttttattcttaatccaagaacatactccctacctatagcaaaatcacttttttaacaaaagaataacgtatttaggtaatcattacgaatttaccctataggtgctactggccattcaatatccggtgcagttgttgtattaacacggttcagcaacacccgatactttttccaggcttccagcaatgaggtttcttcctccgttgcgatttccagatctacagcatcctgaagtggcgcaatatgctcactggctacctgcatcaggctgttttttgtttcttccgcctcccggatccggaacagtttttctgcttctgcatctttcacccaggctgtgccgttccacttctgaaactccccttccggcgataaccaggtaacattttccggtaacggaccgagttcagaaataaataactcgtcccctgacgctacgtcataaaccgttttaccccgatggtcttcaacgagatgccacgatgcctcatcactgttgaaaacagccacaaagccagccagaatatctggcggtgcaatatcggtactgtttgcaggcagacctgtatgaggcggaatatatgcgtcaccttcaccaataaattcattagttccggccagcaggttataaatttttatggtccgtgcttgttcactcattctgaatgccattacggccagacagatggctgcggacaaaatggctgcacaaactttacgcataattacctctcgcttttctgcaataaaaaaggcgccagaaatggcgcccgcatatgggttatgaaaattcagctaatcgtgatacctgctgtggatttcttcatcaccacaaccagcaaatcactgatactggctgtgggataccagtcatttaccagccacgctgataccgaaaactccagcgtcatgtgaccgcgaccagcaggcatatcaataacacctgtataaaccagcgtattatccagcgcggtacggttataaatttcagcaccgtttttcttcactatcagacggcatgaggagtaaatatcagtatgctctctctcatgtttagcgccgctgaatgccaccgccggaataacaatctgccggtcaaacggctgatcgtcataaaccctgacggtaatggtccctgatggccaccgttccggtgcacgggagtcccgggggaaagctttgcccactgttttaacgagatcgccttcaatctggttcgcggacagttttcccagaacccgacagttctcgttaatcgtgacgttgttgagcgtcccggagttcgcattcacgttaccgctgatatcggcatttttcgccgtcagccgcccatccggtgtcagggaaaatgccggtggatttccaccactggtaatggtgggggccgtcaggcgtttcaggaacacgtcgttcatgaatatctgattgccctgcgccacaaacatcggcgtttcattcccgtttgccgggtcaataaacgcgatacggttagcggcaaccagaaactggctcagtttgccttcctccgtgtcctccatactgaggccaatacccgcgacataatgtttgccgtctttggtctgctcaattttgacagcccacatggcattccatttatcgttggcatccttccactctttcgaaaactgctccagtttgctggcgttatcctccgtcaggtcgactttttccagcagctctttaccaagatgggattcggttatcttgcctttgaaaaaatccaggtaaccttccgcatcatcgctcgcccgaccgacggcctccacgaatgccgatttgccaacggtgttcacactgcggatataaaagtaataatcatggcccggtttgatattgatactggcggctatccagtacagccccgtgccaaggtagcgggctgtggtttcaacctgcctgatatcggtaacccaggccacaacatccaccgcatcaccggtcaggtggcggctgttcatggtctggctcttgccttctgcaaccggcggaggtaatgccagaaatgccgacacaatatcaaccacccgataaagcttgaggttgctttcatgcccccctgcaacgggtagattttgcagccttgccgcagcagtctggcgatgtacacctgacagtgccgccagttgactgatattcagcgtcagattttttaactctcgatccatacccgctccagaatgttttaaacatgcatcttgcaaacaactttaggcaaacggtgtcagtaatgaacaaaaaacaatcaaagtcgacaccatgaaaataaaaaagccttaatatcaatcaattatagtggtggtgatgacggatgaaatttcaaaaactagcctttttcctcgacgctcccgccccgtggcaaggccaccccaccgggaggacccatgaaaaatgagagcaattatcatttatgctcaattaaacatcagcattatcgcagcccctcactgaaggactgctgtaatgctgattgttcaacatcaaaaaaacccaatctgttgcaagttataaaagcaacaaacgacattgcgcgttaagattttcttaatatttaagaaatatattttttaatctcatttatttttgcaaaagacttttcatatgcagcgtcgagaaataaagaaaattacttatttaatcactttgattttaactactcttttgtttgtttattttttaagaacacccaccacaatcaatatgaaacaggcgcataaaataaatcaacaacaccagacaattttccttatccgtcacggtgaacgatgtgacagaagcaaaaatgcatgtctctcaagcaataaaggaattaccgtcaatggtgccattaaagctcgtgattatggaaaaatatttagcaatactttcccgtcattcagcctttactccacggataccatacggacaatgcagacagcctgtttttctctggaggaaaagcagcctcccggataccgttggctgcaacatgcggacttgatgctgcaaagaacatactcaaattgtcatccgataataaaactaccgttatattcacccataatcattgcctgacacaaatagcaaaaaaaatgaaatggtggaagttaaagccagaatatcttgaaacactggttcttcatatcgaaaacaatcgtctcattcttgacggaaaactgactcacgataaagcgtaacaatcattcaaagagtcaacatattttctgcattaaccccgaacagttcctctgccggggttttgtattagttatcgcctcaactgaaaatgcggtccgtctttcaggctggtccagtccccgccccattcgatggcagttcccagctctgcggcagcctgcttaaatgcctgcgcgattttctcgtacagaggccagtcccatgacacctggctgccaccccaggccacaacatccaccgcatcaccggtcaggtggcggctgttcatggtctggctcttaccttctgcaaccagctgtttctggcgttctttcgtgcgcaggccctccgtaataccgaaatcaacctccgacagttcaagggcgcggcgaactacagcaaccagctgtggtttgacgccttccagatttttctcgctccggcggctgaatctgaatttacccgacatattcacctcaacaatggaaagattcttgtgacgttcccgcgtgcgcgtatcaccagcacgcagaacagcagattaaaaaacacatccagccagcccgttgctaacgggcgaccacacagatagctgagaggcgaaaaggcatacagcagcgtcagcagccaggccagccatgacatcagcggtttatgcctggaatcgcgacgacgataaaaaaagagcgtcagcacgataaccgtgcataacgccacattcagtaatccgggaaggttacttaacattaccgcctcctccgcctcgcaggcgggagaaccgtcctgacaccagcgatgcgatatcctgctggtggatgaacgacagaatcttcaccgacaccacagacaccagcactgcacacagcgcgtcgacagatttactgtgaagccccagtttttcgaccagataagacgccatcacatccgcccccagtacgccgataataaacgacaccagaaaatgcgccgccacccgccagacagaaagcgcctgcggcatcgttgccacaaacaacgcccccgcgaacgcaccaaacacaatcccgaaatccgttccggtgaacagcccgaataccgtcgcccctccgagcgcagccgccgtgccggaaccggataagggttcagacatactttttttctcctgtaaataaaaaagggccaccagcggcccgtaaaaaacaacaccccgtcaaaggcacccgcagataccttttgtgtggtgtattcagatttgacatacgctgagcagggcgaagaaatgaaaaaggcccgcagtagcgagccatgaagaaactgaataaaaaaaaccgcctggtacggcggttaagatgaatttccaggttttgcttaatacgtgattaatctcaacgttttttatagatgttaacaacatcggaatgatgcatcaccggccctgtcaggaaatacaacatctccaccgataatgcaccattacgctgttgtaaaaagacagcactggactgtaaccgatatcacgtattacagaacaggatgtggataaagattcaggaaaacatcccacatataatatgtcagtgcccaaaacaacctggtatcgtctactgctggagcgggtagcgggaatcgaacccgcatcatcagcttggaaggctgaggtaatagccattatacgatacccgcatatggtgccgactaccggaatcgaactggtgacctactgattacaagtcagttgctctacctactgagctaagtcggcactggaccgccaccgaggactcgaacctcgcacactcaacttaaagggttaacactctttcttggtgaactggtggcggttggtggcccttgctggattcgaaccagcgacctggcgattatgagtcgctcgctctcaccactgagctaaagggccgggccgaaaataataatcagattaaatcaaaaatcaagcccttgcatagatacatatctgtctggcgggaagccataatagcggtgaaatacagagataaagtaggatctacttgaataaccgcatttttctgctacagcctgtccatatccatgccgggagcataacatatttacagcaacccgcatccgttcctcaagtaacaaattactgaacctgagaccttcatccttgagttttttctttaacaagctctcactcatatgcaactgtagagcaatcgcaccaagcgtccagcttgctgatatatctgtttgaattatcgctctgactttggcacttatactggataaacatccacttaaaaataataacatccgttcatctgattcaaacaacgacaggcaggccatcataagaaacatgtccgtggtctctccggaaagtctctggctggtaattaaagccacagccaacgcaggattgttgggttcctgcgacaagtaaagcggaatgtcagtcagaggagttcttgtcagcttatgctgactttccagatattgacttactatagaatggtttatatcgacaattttaactttgccataatgcataaggaaaagctccctgatgcatttggtggccaaaacaactgagccgggcttaagtgacaacgtatccttttcaagaaaaatattaattggggagcaaaccatgataactgaacagacaacagccattataattttactctaattagcaaaaggttagctcaattatatcccaaagaggtaaattctcatcaacacataagcaaatgactggctggtgccgctaacacccacaagccgcccatttaccacaaataaaaaggataacctgccatacccaccatcacaagccgggtccgtattaactggcagcgttcgcgtgaaaggtaagtattctgcgcaattccccgactgtcgccggttcggtgatgcttaattcattaaataccactctggcggtttcggccatgtcctactgttttagcatgccttttccctgttctggttaacgtgacataccaataactcttgtcgaaaaagccagcaagctgaaagaccagtattcgcaaccaccagcgtgtttaatgtaccgcttttcgggcataaaaaaacccgcccggaggcgggttttatattctttgccatcgcgtacaaaatcagcaaaatatcaaatatgcacgaaatatatgccttttaatctacttttgcaatactttacagtgaaaatgccgccttttgttttgaacgtgttctcattacaaacaataaagcctcactatccagtcgttgaaaaatgtgtttcattgcaacccagtgacgagtaaatgttttggaccagtttttagttgtcactcccgccagtaatgccagctcctggtattcataaccttccccaccaaaaagttctgcttttactgcctgcgccgccagccagattaattttttcaggcgttcctgcgttttccctgcaatttttctggtaccggattgagtattaaattcattccacgcccactgtgttatcgcgatctgatattcccaacaaatactctcgccgtaacaccacaacaaccaggctttatgatgctcttcaagagacagcaaagcccgccgccatgatgatgtcgaaaactcaaccgggctgaccagggcaattgatgagccattcgccagtgattgttttcccgggattggtggattatcccgcgttatcatttttccagtcacttcatcgcggtaccggattttttttcgcctgtaacgccctgtatcgaacatggcattctcctgccaggcttcaagctgaccttttgttgccccactcaaatcagcggtggcgataatgagctgctcacgcacaaactgtaaatactggttattcatgcgcactccagttctgtgatttttatccccagccgcccaccaggaacgagctgaccgcgcacaatattgatttcatcaaactgctcgtcgtctatgagtagtccggcatgcgtcagcgcatccagtggtgctttcaggatattgtccaggtcacgacggcgcttatccggtggctctgcaataatctttatcgccagccttccggacaggtttaatttcaaccgctgctggcgaacaattagcgccacatcatggcgataacgctttccggcctccgagatgaaatacgtattgccatgacgtcgccagtaggtattcaccgtcggcgggtaaggcaaaacaaattctatgcgttcagtcattcatgctttccacttcaggacacccgaatttctcgcgtgcattaaaaaacgaatcagcaacaacagctggctgccgtgtttttcttcaaaatcttttaccccggcgtgcagttcgttatgacatttacggcacagcggaataacaaacaaatcatcagcctttgttcccatccctcccagtccatgaccaatgatgtgatgcggatcatctgcctgattaccgcacgtcatgcatttctgcgtttttacccagcgcgtgtatacaggcatctcttcccgttgtggtttctggcgctggagatactgagccggtgactccggatcaacggcaatgcttaccaccgtcttttcctgtggcgggttttgctggtgggcgtgaggcagcggcgcaagattttttgtgcgctgcttcagtatgctggtggcggtctgctctcccggcacgatgtcgctttcacggtacattgagcggattttttccgcacgcaaccccagcgaacgacgtaataccgcttccggtagcgcgtccgccacctgattgcggaccgcccaccaggataattcagccaaagataattcacgctcctgcgtaccgcttattgcgtgaccgatgacgtcaatcatccatgctgacaggttttgatgagcaagttgctcgagtgattcggatgtctggtcacgtagctggttgtcgcagtgccagcacaacaccattgcgccggtaccataacagtgaatgacggtttcgctgtgatgataatcgccgtgtggccactggcaggatttaatatggcgcaacagccagtcagacaatgcaccagcaccaccagcagcacgaatcacccgtgcgttactgaaaaacggcagcaatgttttgtcttccaccagcggctggcgagcggcagggacgactccggacggcagaccgcgcatgcttttcggttcaggctccaccagcactcgagggttatgaaatacttgcatggattcacggcccggcctaaggacaaccagcccaagttccggtaccagaacaggtcgaagtaatatccgcacgttacctccagatccgttgctggtatgtgcgggatgggcgcggtgggcgttcggaataagggagcctgacatagattatccagtgacgataatcgaggctgagggctttcttaacctcgtatccgcgcctgcggtaacactgaattatccattccgcctgctcttcagtgcatggaggatgctggaaccagtctgatttgaatacgtgaaaacgccgtccgcgcctgctggcaaagacggcagaatcattagaattgtgtaatttggtatcgtgcgccatcggttgtctctgctggcgcagcaggtgccagttgttcaggctggcgtgcgtattgtaaaccagaatgccagaaaaaaacaaaacccgccgaagcgggtatgctaaaacaaactgaaggtaatatgccggacttgtaaaggaacgatagaataattatcggattaaatcctgactcaatccataggatttacagcgttttcactaataatttaccgtcccgctatacattactgcccagttttaacgaagtttttaaaggaaacaattgcctgataggggtttggttgacagccaaacatattatcgcaaaaaggcttgatgaaaattcttgcggatccatcttcatttggcattttactcacttgataagcgaggaatgggctatttggtgaagggttataagtggaaattagcgtgtttgtcgccgtttgaattttccatgaggaattattagccaaccagaattgcgctcgtttccaataaaagtcacattgcttttcatctttacatgttagtggcttcattgcttctgctttcaacgctggatcgacctttgctgcacaccctcccaacattactgttgcaatcattacacctacgactaaaacaagtttcttcatctccctgccccatcaataaaagttcggttctctaataactagagttaatcaacggaaaaaacgccgaagcgggttaagtgcgggtgcgttgaggatgcctgacacatcagaggtggcgagggatttctcccccgccaggtctcttactcctcaggttcgtaagctgtgaagacagcgacctccgtctggccggttcggattcgtacctcgcagaggtctttcctcgttaccagtgccgtcactatgacggttaaacagatgacgatcaggacgattaacatcgccttttgctgcttcatagcctgcttctccttgcctttcggcacgtaagaggctaacctagatttgccgttcatagattgagcctcagattaatgttaagcgtcttgcaggacgcgtaatgttaactggggcttttctctatctgcctttggtgttcatgcctgagacagatagcctcaagcacccgcagccattctacttaactcccgttacctcgccaatatgaaatcagtcagaaaggcgatccataagaacaacagcaaggcaataaattgccattacagcagcaatagccagcgcacatttgagaaccagcaccacaacctcctgtattggacgtacaccagtcctgataaatatgaggctgtctcgtcagtgattcaatacaactattgggtatagtttctgtgattttgttctgtagaaatggaacacaacaaccagtcaccaccagcacttctttaaatacgccaagtccgacgcaagctaaccttctagtccgctttgagcgaaaagcagactgtcacgcgttgaagttaattgtattacttagataaacactatcattttcctgacgttaagttgtatctttgataggattaaaaaacgtatagatagcttatgctactgagggaataaaaatgacgaaaattagtgaacgatggaagcacaatggcattactgaaggttattgcaatatttgtgggaaatatggcttgctcacaaaagatcatgttcctccaaagtgcgccataaccttaggccctgttttgcagaaaacagttagcgaattttttggtattcaggaaccagttaaaccattaaatgctaaaaatggctcttatttcagaaccatttgcagccactgtaacaataaggtattaggtgggctcgatgttgcaattgaaaatgtaacaaagtcctttaaagaacagttaaggcgatatatgaatggtatgaatgtatatccattcattagaataccttttgatagcatatctttcactaaggctatgattgggcacgtgctatcagcaacttcagttgaagattgtaaaaaagaacccgtagatagccccttctatacacctttaaaggattatgttttgggtaaaaattcaagttttgaggaaactcatgatatttactactggttttacccacacagaatgcacatatccgctcaaagtgtagcatttatgaacgaaggacatgtggcatttatttgtgctttacattttttccctatcggttttattatcacaatgaaaaatgaaggaacataccctgcccactctacaaaattagaacttgaagataaattccttacatttaatatgacctctataaattatgagtatacgacatttccatttgtaaatcttaagggaaaccaaatgtatgcgataagcaacggtcatacttgtgtgagttatccaataattaagtgacggctaaatcatacaatctacgcatgttcactttctacatataccatctataatgtccgctgttggcacaaagcggacaaccacgctagctctaccctgtgccacaaaaagtcaatttgcatctgaactaatgcacttgaatctcgtcacttcaataaataccgaacatccccctgataaaacgacaatatgcgctgcataacttcactcttccggcactcgcgacagattatgttctgacgcctgtcgtagcgacgtatttctccgtcaggtaatgaccagataaggtccgaatcaaccgcagatggtttcttcagctttgcccttgagagctttttacgggcattttgccagtccttacgcgcctgttcagacgggaataacccgtaaccagagttgtatacatcgccgctggcaaccagctctcttgcgagaacgctcatcagatatcttgtcgcacctgttttgacttccagttgccgtaacgtctcacgcccactctggcgtacgagttcaacaacctgccctttaattttttctcgctcttcttgtgtaaaaacttttgccacaagtcctcctgaaaattacctcatgaccagaaatcaacacttaccccctgaagcccggtggaatttcggtatccggttcagaaatatgattcacacaacgctggttgttcgtgccgcttaccgggagcagccaggggttttcaaaattccggtccggtccaaaaaacgtcgtcgctcgctgaacaaattccgttcccgttttcccggtagccgcaaggtatcttgcgtaacgcctcacgccatccagcatggcctctggtgacaccccctcgcgtaatctggccttccaagcactgaaagcggatttcttcgggtttgccccagcacgcaacgggtattcccgccagacctgttcgaacacatccggataatccactcgtcccacaggctgcccggtgttttccgggactacccgatcggcttcccgctgaatggcggaatcggcttcaggctgctgcagttggtgtgattgctccggccttgcggtcatcacctgctgcacagcgcccgaatcggctttcagcgcatacgctgaatcggcttccggtgtcgtgcctgctggctgaccaagattgacggtctgaacatcccctgcctggttcgtggcgttttttacgccatggaccatagtgttttgatcttcttgatctgtatctttatctgtatctttatctgtcgtgactcgtcgtgacatgtgcgtgacatttcgtgacgcgccgtgacaatcgccattttgttcccgctttctttccctctctcgctgcgccctcttgcgctctgcaggagattttgcggtttgcgaaatattgccgttgtcctctttaagcacctggcgtttttcccatccagtgattaaatcaccatcaagtacccgcccctgcatcgtctgcaaaattgaatcaattacctcttctgtcacgtcgagcgcacttgccaaatcttctgtcgtgacatcaatgtgacctcgcgtgacatttcgtgacgcgctcaccaggaggtggatatacactgccatcactgttgcaattggctgccctgacaccctggcaattgttcgccacttagggtcatttggcatgtcatgccataatctgagccaggcgttagccatactcacctcttctgataccgaatctttttactcacgagttgccggaagtgattcgatatggctattatcactcaatgcactgccacagcatttcctgccgggccaccacggttcatctgattgaaaccggcgattgccactgcgacaaaatcatcagcgtctctcaccagtcgctcccgcgtctccaccagctcccgaaaataagctgaactgtggctgcgcattctggccaccagcaaaggtggcattgccttttcgatcgctggtaacaacgcctgaattttttcaactgcatcaggggtgtctttctctacccagcggaaaattttctgggtattgcgagccagggcttccggatggctgtcgtcatacagttctgggaacatcatacccaactcaaaataagcctgggttattccagccgccggaactttttcgccatcaggacgcgcccaggcattcatcgccatgcggatgtgttcatgcttgattttcatgaatcaagctcctagaaagtggttgtgttaacgttttggtatcttccagctcgggccaaatattcatccaatcaaaaggccttagttgctgacgtgtaacttcaccattactggctcgctcaataaggacgcataacgatgcccctaacacttgacctttactcaatgcctttcttagataaccgatgctggtaccacactcgcatgcaaacatacgctgttcatctgacgaaagagaattgagaaatattcttaattcttccatagctactccttagtaaacacagtaaagaatacccacaggtaaacaaaagtcaatacccacaggttgtttaccttgcggtaatcgcatctattatttacctatggacaaatatgaatttagacgacagcaactcatcaaaattcgtgatgagaaatgcgatggtaaagcggttaacgtggccagaaagatcgggcgcgagccttcttatgtatcaagaatgttgtacccagaggggaaaaagggaaaaaaacggatcgctgatgatatggtggagattatcgaagagtcctttgggttaccccggggatggatggatggtatcgtttcatcatcaacgaacacagcctccagttatgaaacaagggttctaacgccacgacaacgtatttttttagatctcttagacgaactgccagaaagtgaagcggataacttattaaaaactcttgaagagaaaaaacagtattacaatatgatctacgaagaaatccgtaaaaagaaagcacaaaacgcatcatagctcaccaaacaactagtcaccagttaagacaccgcaaaaagttacccatgggtatttactttttaaatacctatgggtatccttcttttcataccaacccaccccgccccacagaatgcagggcaatacttcgagttaccaggcagtggtcaggggttaagtagccagcccgaggcgtaagaacatgacggcagggttcaactttaataactatgcagcaggtttttgttccgctaccccagcgttaaggggaaatgaggtcagcatggatactatcgatcttggcaacaacgaatctctggtgtacggcgtgtttcccaaccaggacggcacgttcaccgcgatgacgtataccaaaagcaaaacgtttaaaaccgaaaatggtgcccgtcgctggctggaaagaaactcaggtgagtgatatggatttcgacacaatcatggaaaaggcttacgaagaatacttcgaagaccttgccgaaggcgaagaagctctcagcttcagtgagtttaaacaggcgctttccagctcggcaaaatctaacggctgataagcgaagtagcaccgcgaggaatcagtatgcagaaacgagaacccgtcataatcgcgccagactataccgatgatgaactttatgagtggatgcgccagaaaattaatgcagcgcaggatctgaaatgggctaatgaagccagggctaagcaggctgaaaatctgtccgctctggagcaggatatcaccaatctggaaaaagcagcggcattaagcattgccagaatgattacatacccgcgttaatagctaaccaacgaagctaaggttggtaattaaggagttctccacgggtgaggtggagtgcgtgcgccggacacgggtaagcatccggcactgacagtttactgaaaggatatttccctgaaaagtcagaccataacgcgaaagcgcacggcgaggtagctggttcatagatagcctgtcgttaaattttcgtcgaccgtgcgcttccggttgtggcaatccgcgaaatggcgcggcggtaagtatggcggggttattccttcccccgttgaggacaccgggttgtcaggttgaccatacgcttaagtgacaaccccgctgcaacgccctctgttatcaattttctggtgacgtttggcggtatcagttttactccgtgactgctctgccgccctttttaaagtgaattttgtgatgcggtgaatgcggctaagcgcacgcggaacagttaaaaccaaaaacagtgttatgggtggattctctgtatccggcgttaattgttaactggttaacgtcacctggaggcaccaggcactgcatcacaaaattcattgttgaggacgcgataatggaaacgttattaccaaacgttaatacgtctgaaggttgttttgaaattggtgtcactatcagtaaccctgtatttactgaagatgccattaacaagagaaaacacgaacgggagttattaaataaaatatgcattctttcaatgctggcccgtttacgtccgatacaaaaaggatgctggcaatgaatacagcatttgcacttgttctgacattttttcttgtttccggagagccagttgatattgcagtcagtgttcacaggacaatgcaggagtgtgtgactgcagcaaccgaacagaaaattcccggtaactgttacccggtcgataaagttattcaccaggataataacgaaatcccagcaggtctttaaaacagttccgtaataaacatccgatttcattcttatatgccagaaatggcagggatttgttcacccttaaatctgtaatgaggtaaaacaaaatgagtaaagtctttatttgcgccgccattccggacgaacaggcaataaaggaagaaggtgcagtcgctgtagccactgccattgaagccggtgatgaacgtcgcgcccgcgcaaaatttcactggcaattcctggaacattatccggctgctcaggactgcgcttataaatttcttgtttgcgaggataaacccggtataccccgccctgccctcgattcctgggatgctgaatatatgcaggaaaaccgctgggatgaggagtctgcttcctttgtcccggttgagactgaatcagatccgatgaacgtcacttttgacaagctggcccctgaagtacagaacgctgtcatggttaagttcgacacatgtgaaaacatcaccgttgatatggtgattagcgcgcaggaattgttgcaggaagacatggcaacattcgacggacatatcgttgaagcgttgatgaaaatgccagaagttaacgctatgtatccggagcttaagctgcatgccatcgggtgggttaagcataaatgtaagcctggtgccaaatggcccgaaattcaggcagagatgcgcatctggaaaaaacgtcgcgaaggtgaacgcaaggaagccggaaaatacacgtctgttgttgatctcgcccgcgccagagccaatcaacagcacactgaaaattcaacaggaaaaatcagcctggtcattgctgccattcatcgcgaatacaagcagacatggaaaacactggatgacgaactggcctacgctctctggcctggtgatgtggatgccggaaacattgacggcagcatccatcgctgggcaaaaaatgaagttatcgacaacgaccgcgaagactggaagcgtatctctgcatcaatgcgcaaacagcctgatgcccttcgctacgaccgccggactatttttggccttgtccgtgaacgtccgatcgacattcacaaagaccctgtggcactgaacaaatacattactgaatacctgactacaaagggcgtgtttgaagatgaaggaagaaatcagagcgcaactgatactctctcgtcgccagtaccagaaactgatgcagtggaaacggcaattccggacaacgaaaaaaccgaatgcaaagtggaagtcgaaccatctgtagagcgtgaggggccgttctacttcctcttcaccgacaaggatggcgaaaaatacggtcgcgcaaacaaactttctggtctggataaggcactggctgccggggctactgaaatcacgaaagaagaatatttcgcccgcaaaaacggtacatactcaggttcacaacaaaatactggtgcatctgacacgaccgcacaaccagggccggtaaaagttaccgctgacgaagtaaacaaaattatgcaggcagccaatatcagccagcctgacgccgataagttgcttgctgcctctcgcggagaatttgttgcagggattagcgacccgaatgatccgaaatgggttaaggggatccagacccgcgattctgtaaaccagaaccagcatgaatcggaacggaactaccaaaaagcggaacaaaacagcccaaatgcgttacaaaacgagccagaaacgaaacagcctgaaccagtggcgcaacaggaagtggaaaaagtctgcaccgcctgcggtcagaccggcggcggcaactgccctgattgtggcgcggtgatgggcgacgcaacataccaggaaacattcgatgaagagtatcaggttgaagttcaggaagatgatccggaggaaatggagggcgctgaacatccacacaaggagaacactggcggcaatcggcatcacgatagcgataatgaaactggcgagacggcagctcactcaattaaggtgaacggtcatcaagaaatcacatccaccagcagaacgtgtgaccatctaatgatcgaccttgaaaccatgggaaaaaatcctgatgccccgatcatctcaataggtgcaatatttttcgatccgcaaaccggagatatgggaccggaatttagtaagactatcgatctggaaactgctggcggagtcattgatcgggacaccattaaatggtggcttaagcaatcacgcgaagcgcaatctgccattatgaccgatgaaatcccgttagatgatgcactgttacaattgcgggaatttatcgacgaaaactccggtgaattttttgttcaggtctggggaaatggagccaacttcgacaacacgattttgcgccgttcatacgaacggcaggggatcccctgcccgtggcgttactacaacgatcgcgatgtacgcacaatcgttgagctggggaaagccatagacttcgatgccagaacggctattccattcgaaggtgagcgccataatgcacttgatgacgctcgttaccaggcaaaatacgtttcagctatctggcaaaaactgatcccgagtcaggctgatttttaatgttcaaccctaattgccgctaaccgtatatagttagcggcggttatgagatatagctatgagcagcttatttttaaccgaagatgaattgctaatattaacgggctgcaaatatgcaagccaccagcgaaaatggttaatggaaaacgggcttccgttctataccaatcgtagtggcaaaccgattgtcagccgggatctatttacctgcaataaaactttaccaccacgcgaggtagagccgaattttggtgcgatctgatgggaagacgaaggaaaaatcctgaacacgaaaaattacctccaaatgtatacccaaataaatatagttatgtatggaaaccaacatccagagaatctgtcacactaaccgccatcaaggatggtttagctgctttatggaaaaagtatgaggaaactgtaaataatcgcgatcgtgcaatgacattcggtcgcttgtgggaaaaattcctcgccagcgcctattacagtgaccttagtccaagaacacaaaaagattatctgcaacatcaaaaaaagttgcttgccgtattcggtaaggtaccagcggattccataaaaccagaacacatccgtcgatacatggacaaaagaggggagcagagtaaaacgcaagccaaccatgaaaaaagcagtatgtcccgtgtttacagttgggggtatgagcgagggtacgtgaaggctaacccatgtgcaggtgtaagtaaattcaaggccaaaaaccgcgaacgatatgtaaccgacaaagaataccaggcagtattaagcgttgcacctcttcctgtttttatcgcaatggaaattgcctatctgtgtgcagcgagggtttccgatgtgttatcgctgaaatgggaacagattggaaacgacgggatattcatccagcaagggaaaaccggaaaaaaacagataaaagcatggagtccacgattacaggcagcgatcgaaaaagcaaaacagttaccaaaatctgcctatgtgatcagcaatcaatacggcaaccgatatatgtacaaaggctttaacgaaatgtgggtagatgcaagaaatcgtgctggaaaaatttcaggtattttaaccgacttcacctttcatgatctgaaggcgaaaggaatttcagactatgaaggaagcagccgggataagcaacttttctctggtcacaaaaccgaagggcaagtgctaatctatgacaggaaggttaaagtttcaccaacacttgatgtcccgttacctgaaaatattccaagtaattccaagtgtgatttttgtcactgacttaatgatgtgtaagtgattgaattttggcggagagagggggatttgaacccccggtggagttgcccccactccggttttcgagaccggtccgttcagccgctccggcatctctccgttcagatggttgccatgatgccaggaaatttggcattttaacagtccctgtccgtgcaattttgttcaagtgacgagtttgcgagcaaaacgatgattaagtggccctggaaagtacaagaatcagcacatcaaactgcccttccctggcaggaagcactatcgatcccccttttaacgtgtctgacggaacaggaacaaagcaaattagtcactcttgccgaacgttttttacagcaaaagcggcttgttcctttacagggctttgaactggattcattaagaagctgccggatagcacttctattttgcctacccgttctggagttaggactggaatggctggatggttttcatgaagtcttaatttatcctgcgccatttgtggtcgatgatgaatgggaagacgatatcggtctggtgcataaccaacgtattgttcagtcaggtcagagctggcagcaagggcctatcgttttgaactggttggatatacaagattcttttgatgcttctggttttaacctgattattcatgaagtcgctcataagctggacacccgtaacggcgatcgcgccagcggagttccctttattccgttgcgtgaggttgctggctgggaacacgatcttcatgctgcaatgaacaacattcaggaagaaatcgaattggttggcgagaatgcggcgagcattgatgcttatgctgccagtgatcctgctgaatgttttgccgtactttctgaatatttctttagcgccccagaactttttgctcctcgtttcccttcattgtggcaacgtttctgccaattttatcaacaagatcctttgcagagactgcatcgcactaatgatacagactcgttttcggcgacgaatgttcattaattaacaactttgcagattaattaaccaattgaaatgacttatgaaatttagtgttgacagacaaggtaccgctaagtaatatgcgccccgttcacacgattcctctgtagttcagtcggtagaacggcggactgttaatccgtatgtcactggttcgagtccagtcagaggagccaaattctaaaaattcgcttttttagcgcaatgtcactgaccttagttgaacattgttttttaacggatagcgggtttttaacatcttaagcgccctcgacctttatggttgagggtgttttgctatgaacgccatcaccattttcccctcgattataaaacttgagttattcagtagtctcccctcttgcaactcacactcaaaactgcctaacgaaaagttattaattttcaatcatattgctatcaggatttacattttttcgctgtgctagaaagggcgcatttatgttagctcgttcagggaaggtaagcatggctacgaagaagagaagtggagaagaaataaatgaccgacaaatattatgcgggatgggaattaaactacgccgcttaactgcgggtatctgcctgataactcaacttgcgttccctatggctgcggcagcacaaggtgtggtaaacgccgcaacccaacaaccaattcctgcacaattcgccattgcaaatgccaatacggtaccctatacccttggagcgctggaatcggcccaaagcgttgccgaacgcttcggtatttcggtggctgagttacgcaaactcaaccagtttcgtacgtttgctcgaggttttgataatgtccgccagggtgatgaactggatgtcccggcacaagttagtgaaaaaaaattaaccccgccgccgggtaatagcagtgacaacctcgagcaacagatagccagtacttcacagcaaatcgggtctctgctcgccgaagatatgaacagcgagcaagcggcaaatatggcgcgtggatgggcctcttctcaggcttcaggcgcaatgacagactggttaagccgcttcggtaccgcaagaatcacgctgggcgtggatgaagattttagcctgaagaactcccagttcgattttctccatccgtggtatgaaacgcctgataatctctttttcagtcagcatactctccatcgtactaacgagcgtacgcagattaacaacggcttgggttggcgtcatttcactcccacatggatgtcgggcatcaacttctttttcgaccacgatcttagtcgttaccactcccgcgccggcattggtgcggagtactggcgcgactatctaaaattaagcagtaacggctatttgcgactgaccaactggcgcagcgcacctgaactggacaacgattatgaagcacgcccggccaatggctgggatgtacgcgcagaaggctggctacccgcctggccgcaccttggcggtaaactagtctatgaacagtattatggcgatgaagtggccctgttcgataaagacgatcggcaaagtaatcctcatgccataaccgctggacttaactatacccccttcccgctgatgaccttcagcgcggagcaacgccagggtaaacagggcgaaaatgacacccgttttgccgtcgattttacctggcaacctggcagcgcaatgcagaaacagcttgacccgaatgaagtcgctgcacggcgtagccttgcaggcagccgttatgatctggtggatcgcaacaacaatatcgttctggaatatcgcaaaaaagaactggttcgcctgaccctgacagaccccgtgacagggaagtcaggagaagtgaaatcactggtttcgtcgctacaaaccaaatatgccctgaaaggctataacgtcgaagccaccgcactggaagctgccggtggcaaagtggtcacaacgggtaaagatattctggttaccctgccggcttaccggttcaccagtacgccagaaaccgataacacctggccgattgaagtcaccgccgaagatttcaaaggcaatttgtcgaatcgtgaacagagcatggtggtcgttcaggcacctacgctaagccagaaagattcctcggtatcgttaagtacccaaacattgaacgcggattcccattcaaccgccacactgacttttattgcgcatgatgcagcaggtaatcctgttgtcgggctggtgctctcgacgcgtcacgaaggtgttcaggacatcaccctttctgactggaaagataatggtgacggaagctatacccagatcctgaccacaggagcgatgtctggcacgctgacgcttatgccacagctgaacggtgtggatgcggctaaagcccccgccgtggtgaatatcatttctgtttcgtcatcccggactcactcgtcaattaagattgataaggaccgttatctctccggcaatcctatcgaggtaacggtagaactgagagatgaaaatgacaaacctgttaaggagcaaaaacagcaactgaataccgcagtcagcatcgacaatgtgaaacctggtgtcactacagactggaaagaaaccgcagatggcgtctataaggcaacctataccgcctataccaaaggcagtgggcttactgcgaagctattaatgcaaaactggaatgaagatttgcataccgctggatttatcatcgacgccaacccgcagtcagcgaaaattgcgacattatctgccagcaataatggtgtgctcgccaatgagaatgcagcaaacaccgtctcggtcaatgtcgctgatgaaggaagcaacccaatcaatgatcataccgtcacgtttgcggtattaagcggatcggcaacttcctttaacaatcaaaacaccgcaaaaacggatgttaatggtctggcgactattgatctgaaaagtagtaagcaggaagacaacacggttgaagtcacccttgaaaatggcgtgaaacaaacgttaatcgtcagttttgtcggcgactcgagtaccgcacaggttgatctgcagaagtcgaaaaatgaagtggtcgctgacggcaatgacagcgccacaatgaccgcgacagttcgggatgcaaaaggcaacctgctcaatgacgtcaaggtcaccttcaatgttaattcagcagcagcgaaactgagccaaaccgaagtgaatagccacgacgggatcgccacagctacgctgaccagtttgaaaaatggtgattatacggttacggcctctgtgagctctggttctcaggctaatcaacaggtgaattttatcggtgatcaaagtactgcagccctgaccctcagtgtgccttcaggtgatatcactgtcaccaacacagctccgcaacatatgactgcaaccttgcaggataaaaatggcaacccactaaaagataaagaaatcaccttctctgtgccaaacgacgtcgcaagtcggttctcgattagcaacggcggaaaaggcatgacggatagtaacggggttgcaatcgcctccctgaccggcacgttagcgggcacgcatatgatcacggctcgtctggctaacagcaatgtcagcgatgcacagccaatgacgtttgtggcggataaagacagagcggttgtcgttctacaaacatcgaaagcggaaatcattgggaatggcgtggatgagacgaccctgacagcaacagtgaaagatccttttgataacgtggttaaaaatctgtcagtagtcttccgcacctcccccgcagacacgcaactgagtctgaacgcgcgtaatactaatgagaacggtattgctgaagttacccttaagggcacggttttgggtgttcatacagccgaagccatactgctttacggcaacagagatacgaagatagtcaatattgcgcccgatgccagcaacgcgcaggtcaccctgaacatccctgcacaacaggtggtgacgaataacagcgacagcgtgcagctgacggcgacggtgaaagatccgtcgaatcatccggtggcgggaataacggtgaacttcaccataccacaggacgtggcggcaaactttacccttgaaaataacggtattgccatcactcaggccaatggcgaagcgcatgtcaccctcaaaggcaaaaaagcgggcacgcatacggttaccgcaacgctgggtaacaataatgccagcgatgcgcaaccagtcaccttcgtggcggataaggacagcgcggttgtcgttctgcaaacatcgaaagcggaaatcattgggaatggcgtagatgagacgactctgacggcaacagtgaaagatccttttgataacgcagtaaaagatctacaggtcaccttcagtaccaaccccgcagatactcaacttagtcagagcaaaagcaatactaacgacagtggtgtggccgaagttacctttaagggcacggttttgggtgttcatacagccgaagccacactgcctaacggcaacaacgatacgaagatagtcaatattgcgcccgatgccagcaacgcgcaggttacgctgaacatccctgctcaacaggtggtgacgaataacagcgacagcgtgcagctgacggcgacggtgaaagatccgtcgaatcatccggtggcgggaataacggtgaatttcaccatgccacaggacgtggcggcaaactttaccctcgaaaataacggtattgccatcacccaggccaatggggaagcgcatgtcacgctcaaaggtaaaaaagcgggtacgcatacggttaccgcaacgctgagtaataacaataccagtgattcacagccggtaacgtttgtggcggacaaaacctcggctctggttgttcttcagatatcaaaaaatgagatcacaggtaatggcgtcgatagcgcaacgctaactgcaacggtcaaagatcagttcgacaatgaggtgaacaatcttccggtaacattcagcacagcttcttcaggcctcaccctgaccccaggggaaagtaataccaatgagtctggcatcgcgcaggccactctcgcaggcgttgcctttggtgagcagactgttactgcatcactggctaatactggtgccagcgacaacaaaactgtgcactttattggcgacacaacggcggcaaaaattatcgagttgacgcctgacccaggcagcataatcgccggtaccccacagaacagcaccggtagcgtaatcaccgctacagtcattgataataatggctttccggtgaaaggtgtgactgtgaacttcaccagcaacgcagcgacagccgaaatgacgaatggcggccaagccgtaacgaacgaacagggtaaggctaccgtcacttataccaatacccgctcctcgatagaatcaggagcgagaccggataccgttgaggccagtctggaaaatggtagctccacgcttagcacatcaattaatgtcaacgctgatgcgtctacagcacatctcaccttgttacaggcacttcttgatacagtctccgcaggcgacactaccaatctgtatattgaggtgaaggataattacggcaacggtgtaccccagcaggaggtaaccctcagcgtttcaccaagtgaaggcgtgactcccagtaataacgctatatatacgaccaatcacgacggcaatttttacgcaagctttaccgctacaaaagccggggtttatcaagtgacggcaaccctcgaaaatggcgattcgatacaacaaacggtgacctatgtgccgaacgtcgcgaatgccgaaatcacgctggcagcctcgaaggatccggtgattgccgacaataacgatctcacgacactaacagcaacagtcgctgatacagagggcaatgcgatagccaacactgaagtaacatttactctgccggaagatgtgaaggcgaacttcacgctgagcgatggcggtaaagcggttactgatactgaaggcaaagcgaaagtcacgctgaaaggtacaaaagcaggcgctcatactgttacagcatcgatggctggcggtaagagtgagcagttggtggtgaattttattgcggatacgctcacagcgcaggttaatcttaacgttaccgaggacaactttatcgctaataacgtcgggatgaccaggctgcaggcaacagtgactgatggaaacggcaacccgttagccaatgaggcggtgacattcacgctaccggcagatgtgagcgcaagctttactctcggacaaggcggttccgccattactgacatcaacggcaaggctgaagttacactgagcggtacaaaatccggcacctaccccgtgacagttagcgtgaacaattatggtgtcagtgatacgaaacaggtgactttgattgccgatgctggtaccgcaaaactagcctccttaacctctgtatactcattcgtcgtcagcacgaccgagggcgcgaccatgactgcaagcgtcactgacgctaacggcaacccggtagaaggcataaaagttagtttccgcggaacctccgtcacgctaagcagcaccagcgttgaaacggatgatcggggtttcgctgaaattcttgtgacaagcaccgaggtcggactgaaaacagtttcagcctctctggcagataaacctactgaagtcatctcgcgattactgaatgcaaaagcagatattaattctgcaacgattaccagtctggagatacctgaaggtcaggtcatggtcgcacaagacgtagcagttaaagctcacgtcaacgaccagtttggcaatccgattcttaatgaatctgtaacattcagtgcagagccaccagagcacatgaccatcagcccaaatattgtctctactgatacgcatggtatagccgaggtcactatgacgcccgaaagaaacggttcgtatatggtgaaagcatccctggcgaatggatcctcttatgagaaggatctggtggtaatcgatcaaaaactgacactctcggcgtccagcccgcttatcggtgtcaattccccaacaggtgcaactctgacggcaacgctaacttctgcaaatggcactccagtggagggtcaggtcatcaactttagcgtaacgccagaaggtgcgacgttaagtggcggaaaagtgagaaccaactcttcaggtcaggctccagtcgttctgaccagcaataaagtcggtacatatacggtgactgcatcgttccataacggtgtaacaatacagacacagacaatcgtgaaagtcactggcaactcaagcaccgcccatgttgctagctttatcgctgctccatcgactatcgccgccaccaacagtgatttaagtaccttaaaggcaacggttgaggatggcagtggtaacctgatcgaaggtttaactgtgtacttcgccttaaaaagcggctctgccacattaacgtcattaacagcggtgaccgatcaaaacggaatcgcgacaacaagcgtgaaaggagcgatgacaggtagcgtcacggtaagcgcagtcacgaccgctggtggaatgcaaacagtagatataacgctggtggctggcccggcagacacctcgcagtccgtccttaagaacaatcggtcatcattgaaaggagactttaccgatagtgctgagctacatcttgttctgcacgatatatcaggccatccgatcaaagtttctgaagggctggaatttgtgcagtcaggtaccaacgtgccctatgtgcaagttagtgcaattgactacagtaaaaatttctcaggcgagtacaaagccactgttacaggcggcggagagggtatcgcaacgctgatccctgtattgaatggtgttcatcaagctggtctgagtaccacaatacaattcactcgcgcagaagacaaaataatgagcggtacagtgtcagtcaatggtactgacctaccgacaactacattcccttcgcagggattcaccggggcgtattatcagttgaataatgacaactttgcccctggaaaaacggcggctgattatgagttttcaagctctgcctcctgggtcgatgttgatgctaccggtaaagtgacatataaaaatgtcggcagcaattgggaaaggattacggcgacgccaaaatcaggaggccctagctatgtatacgaaatccgtgtgaagagttggtgggtgaacgccggcgatgctttcatgatatacagccttgctgaaaatttttgcagtagcaatggctacacacttccccgtgcagatcatttaaaccatagtcgttcccgaggcatcgggtcactgtacagtgaatggggagatatggggcattacacgactgaggctggttttcaatcaaatatgtattggtcatctagtcccgcaaactcaaacgaacaatacgtagtttccctggcaacaggtgatcaaagcgtatttgaaaagcttgggtttgcttatgcgacatgttataaaaacctctgattttccgttataatttcttaaagagtgctccattcggggcactcttttttacattccctctatagagcttgctcttctctcaccgaaaatgaataaataaaaatgcgataccgccagattcgcgttcggtgtgactatgatcgtatccggtgagtacagctttgatccaaaggctggttttctgtgatgattgaccagcctcagagtattgatgacaccaccgttcataacagatcggcattactatgcataagtactgtctcatattctcgccaaaacactttttaatgcctttgcgaattcatccagacttatattgtcaattttttgcccaacgacgactgactccgaaacatcggccattgcgggccatcgcgttttgtaatcagcataaattgcaacaacgggggtattataggcacttgccatatgtaatattgaagtgtcaggagttattgcgatataagcatcttttatgattgctgctgaacgtttaatcgagggtgataaggataaacggtagacattattataacaatccactaataccctggctttatcttccccttttggtccatgaacgatcactattggtatatctgtttcactttgaatttttgctattagattttctgcaatcgatagtgaaaatgtacgttcctgcgagctaccttctaaattaagcgcaatgtaagatcctaacgatcgcatttcctcgcgcacctcatcgagtacatcctcacttagtggcaattcatatattggcctgactgctggaaaacccgcctcacgcatcataaatgcccatgtcatgggtacgggagcccggagattctgatccatccgggacgcgttcttacacacaggggaatagcacttcatggttaaatcaacaacctgaaaattcgtttttgctttcaactgactgataaataacatcgttttcaggttctttttacgcatcgcctctatacaaagatccggcgtaccgtattgctgtgttatgttcttcgctaaatcttttatttcttttaatgttgcgtgatcctgcatagtcattgtgactaatgttaatttagtctgttcaagtttgagcacattaaagacttctaaattaattgtcgacgtaacaattaatagatgcttaattttatgcaattcaagcgcccgaataacaggaaagatggccatagcatcgccaatctgatcgggaatatggatgacaacaaagtctgttttttcaatattgaaattataagctttataatcgtagtagctaaatgcaatacgtctcaacaatgatactaaaaacataactaacctcgcctccctactggttataatgcaatgcagtctatcagaatcatcagggtgccattttgtgcatatgcggacttttatgtttcatatctcgaacctgtgggtcctctgcttaatccttaaacaacaccagcaactcccgcgctttcatcttccagcgaatttttcatgttgccgctaatcagccataaaatcatttgcagatgcgctctgtcgaggtagtctcataaggttcgtttatagatcgacggcaatgtgagttaccttttccatactaattataaaaagacagtacaaacaggatcattatggactccacgctcatctccactcgtcccgatgaaaggacggtttcgttaagtcgcgcccgacgagctgcgttaggcagtttcgctggtgccgtcgtcgactggtatgattttttactctatggcatcaccgccgcactggtgtttaatcgcgagtttttcccgcaagtaagcccggcgatgggaacgctcgccgcatttgctacctttggcgtcggattccttttccgtccgctcggcggtgtcattttcggtcactttggcgaccgactgggacgtaagcgcatgttaatgctgactgtctggatgatgggcatcgcgacagccttgattggtattcttccttcattctcgaccattgggtggtgggcacctattttactggtgacgctgcgtgccattcagggatttgccgtcggcggcgaatggggaggcgcggcgttgctttccgttgaaagtgcaccgaaaaataaaaaagccttttacagtagcggtgtacaagttggctacggtgtaggtttactgctttcaaccggactggtttcattgatcagtatgatgacgactgacgaacagtttttaagttggggctggcgtattcctttcctgtttagcatcgtactggtactgggagcattgtgggtgcgcaatggcatggaggagtccgcggaattcgaacaacagcaacataatcaagctgccgcgaaaaaacgcatcccggttatcgaagcgctgttacgacatccaggtgctttcctgaagattattgcgctacggctgtgcgagttgctgacgatgtacatcgttaccgcctttgcacttaattattcaacccagaatatggggttaccgcgcgaacttttccttaatattggtttgctggtaggtggattaagctgcctgacaattccctgttttgcctggcttgccgatcgttttggtcgccgcagggtttatatcacaggtgcgttaatcggaacgttgagcgcatttcctttctttatggcgcttgaagcacaatctattttctggatagttttcttctccataatgctggcaaacattgcgcatgacatggtggtgtgtgtgcaacaaccgatgtttaccgaaatgtttggtgccagttatcgctatagtggcgctggagtcggttatcaggttgccagtgtggttggcggaggatttacaccttttattgccgctgcactcatcacttactttgccgggaactggcatagcgtcgccatgtatttgctggctggatgtctgatttctgcaataaccgctttgttgatgaaagacagtcaacgcgcttgatagcctggcgaagatcatccgatcttcgccttacacttttgtttcacatttctgtgacatactatcggatgtgcggtaattgtatggaacaggagacacacatgaataataagggctccggtctgaccccagctcaggcactggataaactcgacgcgctgtatgagcaatctgtagtcgcattacgcaacgccattggcaactatattacaagtggcgaattacctgatgaaaacgcccgcaaacaaggtctttttgtctatccatcactgaccgtaacctgggacggtagcacaaccaatccccccaaaacgcgcgcatttggtcgttttactcacgcaggcagctacaccaccacgattactcgtcctactctctttcgttcgtatcttaatgaacaacttacgttgctgtatcaggattatggtgcgcatatctcggtgcaaccctcgcagcatgaaatcccttatccttatgtcatcgatggctctgaattgacacttgatcgctcaatgagcgctgggttaactcgctatttccctacaacagaactggcgcaaattggcgatgaaactgcagacggcatttatcacccaactgaattctccccgctatcgcattttgatgcgcgccgcgtcgatttttccctcgcgcggttgcgccattataccggtacgccagttgaacattttcagccgttcgtcttgtttaccaactacacacgttatgtggatgaattcgttcgttggggatgcagccagatcctcgatcctgatagtccctacattgccctttcttgtgctggcgggaactggatcaccgccgaaaccgaagcgccagaagaagccatttccgaccttgcatggaaaaaacaccagatgcccgcgtggcatttaattaccgccgatggtcagggtattactctggtgaatattggcgtgggaccgtcaaatgctaaaaccatctgcgatcatctggcagtactacgcccggatgtctggttgatgattggtcactgtggcggattacgtgaaagtcaggccattggcgattatgtacttgcacacgcttatttacgcgatgaccacgttcttgatgcggttctgccgcccgatattcctattccgagcattgctgaagtgcaacgtgcgctttatgacgccaccaagctggtgagcggcaggcccggtgaggaagttaaacagcggctacgtactggcactgtagtaaccactgatgacaggaactgggaattacgttactcagcttctgcacttcgttttaacttaagccgggccgtagcaattgatatggaaagtgcaaccattgccgcgcaaggatatcgtttccgcgtgccatacgggacactactgtgtgtttcagataaaccgttgcatggcgagattaaacttcccggccaggctaaccgtttttatgaaggtgctatttccgaacacctgcaaattggcattcgggcgatcgatttgctgcgcgcagaaggcgaccgactgcattcacgtaaattacgaacctttaatgagccgccgttccgataataagttatgaaccttcttatcaaaaatagatgtgaaggattaagtaagacatctggcaaatagcccgcaataaacgcgggctgtttgcttccttgggcggatacgagttttattatcgtcttaatgatttccacatattaaaagcaagtatgctttcaaaacacaattataaaaaatcccaccaacaatataagtttatataaaattaaatataatattatgactttagaatatttttatttctaatagacgagatttttcctgttatgatataatatgccgaattaacacatgttaacgatttaccagtaatgtaaataaattttcgaggagatcattccagtgggacgtaaatgggccaatattgttgctaaaaaaacggctaaagacggtgcaacgtctaaaatttatgcaaaattcggtgtagaaatctatgctgctgctaaacaaggtgaacccgatccagaattaaacacatctttaaaattcgttattgaacgtgcaaagcaggcacaagttccaaaacacgttattgataaagcaattgataaagccaaaggcggcggagatgaaacgttcgtgcagggacgttatgaaggctttggtcctaatggctcaatgattatcgccgagacattgacttcaaatgttaaccgtacgattgctaacgttcgcacaattttcaataaaaaaggcggcaatatcggagcggcaggttctgtcagctatatgtttgacaatacgggtgtgattgtatttaaaggaacagaccctgaccatatttttgaaattttacttgaagctgaagttgatgttcgtgatgtgactgaagaagaaggtaacattgttatttatactgaacctactgaccttcataaaggaatcgcggctctaaaagcagctggaatcactgagttctcaacaacagaattagaaatgattgctcaatctgaagttgagctttccccagaagatttagaaatctttgaagggcttgttgatgcccttgaagatgacgacgatgttcaaaaagtttatcataacgtcgcaaatctctaattatattttaaagaaatctgtctttatggcagatttctttaatctcatataatcattataaaaatataatgttcaactcgtcatattgcttataaaaaatccccgtttccagagaaataatatttattaaaattctaggtcttctttttctgattaccgaagacaaagtggcaattacgtatagtttcccgataaagacgcgacagcgacatcccgcataaggcattgttctctttatctttgtacggtacttcatggaacagagattttgaccttgcgaatcgtgatgtctgttgggggcaatttgctcactgaagcgtgagactcgattaaacgcacgaaacacagaaatcaaaaaacccggtcacttttttacaaggtaaccgggtaaaaataatttttattttttaactgttttgagattcatagagatgtctcaaaactaaaatttggctcctctgactggactcgaaccagtgacatacggattaacagtccgccgttctaccgactgaactacagaggaatcgtgagaacgaggcgaatattagcgatgcccaaccacaatgtcaaagcctgttttttaaatttgaaatcgtttgctgaaataatctgcattttgtcgtttattccgacacagctggctttttttcacacttttgcggttcgggtcgagggtatttccatagccaacgtccagtaaccattcgccagtaaaacagcacggcccgcacagcccagtcggcaaacattcccatccagacaccaaccacaccccagccaagcatgatgcccagcacataaccgacgacaacccggcaaccccacatgctcaacatagaaacccacatagcgtaacgggcgtcacgagcccccttaaatccagcgggcagcacccatgaggcggaccaaataggcataaataaagcatttagccaaatcagaatcacaacgacatgtttaacctgtggatcctgggtgtaaaacgatgccataaccccggcaaagggagccgttagccaggcgatggccgttaatccaagagtggaaagccagaacacatgccgcaactgaatctctgcttgcgctatctgtcctacacccaaccttcggcctgtaatgatcgtagaagcagagccgagcgcacttccgggtaagttgataagagccgcaattgaaaacgcgataaaatttccggcaataacactggtccccatcccggcaacgaacatttgggttaataaccgaccactggtaaataacactgattcgacactcgcgggaataccaatccccatgacttcccagataatgctaaaattcagcggtttaaaatagctctttaacgaaatccttagcgcaggattaaaaccaatcgccaacacccacaaaattgcaactgcgccaatataacgagaaatggttaaacccaacccagccccgacaaatcccagtcccggccaggagaaaaggccgtaaatcaatatgccgctaataataatattaagaatattcaggctaccgttaatcagtagcggtattttcgtattccctgcaccacgaagtgccccgctaccaattagagtgatggcagctgctggataactgagtaccgtcagctccagataagtcaacgccagtgctttaacttctgtcgtggcatcacccgcgacgaaatcaataatttgctcgccaaaatgatgaataagcgttgccaacagtacggcaaacaacgtcatgatcaccaatgactgccgcgtcgccaccctcgctcgtcgtcgatcccgcttaccgagactaaatgccacaacgacagtagtaccaagatcgatagcagcaaaaaaagccataatgaccatattgaagctgtccgccaatcccacgccggccatcgcatcttttcccagccagctgaccagaaaagtgctcagaacccccatcaacaggacacaggcattctccatgaagataggaacagcaagcggggttatctcgcgccagaacaacactttgtagctcttgcgtttagcgtgccagcgagtgccgtgaacaacctggcgtaaagcagaggagatattcaaagccgaccttaattgcagaaagtgaaaccacatttcaaataatgagggagaatcagcaaagctgcaaagattttcgccaacaaattgtctgcaaatgcaacaaactgttgatagaaacggcaaacagttgggaaaattaaaaatcgggtttgacaaaagatttttcgccgttaagatgtgcctcaacagcgattcctctgtagttcagtcggtagaacggcggactgttaatccgtatgtcactggttcgagtccagtcagaggagccaaatttctgaaaagcccgcttttatagcgggctttttgctatatctgataatcaatttcctcttcactgttttccatcacctgccgcttgatatcctcaactgaaagtcctgcattacaaagttccagaaagcgccagacatagttacgctgaagttgtcctcgcttcagtcccaaccagacagtattagcatcaaaaagatgccgcgtatccaggcggattaaattcttttcctcttgttcaccgctggattgttcggcaactattccgatcccaagcccaagagcaacataggttttaatgacatcagaatcctgcgcacttaatacaatatctgccagcaaacctttgcgggcaaatgcgtcatcaatacgtgagcgccccgtaatcccctgtcggtaagtgattaacggccacttcgctattgattccagcgtcaatggtgtaatttgcgtcaagggatgatcgagtggaacaagcaaactatggtgccaacgaaaccacgggaaggcgacgagctgcgggtcattactcaaacgctcgctggcgataccaatatcagcttcaccattatgcaacaacgtcgcaatttcctgtggcgtcccctggattagctcgagccgaacctccgggaaaagttcgcgaaaagatttaatgacctctggcaaactataacgtgcctgagtatgcgtcgttgcaatagtgagaacgccagacgtatcgttggtaaacaggtctgcaagccgacgaacattactggcttcattcagaatacgttctgcaatgaccagtaatgctttgcccggttcagtcatgcccagcagtcgcttacctcgtcgaacaaatatttcgatgccaagttcatcctccagttcccgaatatgacggctgacgccggactgtgaggtaaaaagcatattcgcaacctctgtcaggttgtaatcctgacgtgcagcctcgcggattatctttagttgttggaaattcacggtaaactccgggcagttcagattttccgttattgttaaagtctaatgcccggcataacaaataataaaaacccgcatcttattccatcccgatataacgcttagctcaccaattgccactgccttttttccatcactggagaactcatcactgacattaacaactctttcactgcctgtgcctgtggtgacaagtttgctctggcgggtaaatttaaggacaaagagagactcattgaaggagtggtaatgcgtgacatccacccatttactgcgccacataacgaacgcgcagccgattcaggtaatactgcaacgcccatgccgctggcaatcgctgcggtaagcgtggcaatagactcaatttcaccaatgacttttgccgtgagccgccgtagggaaaaagcctcatcaacacgaagtctaacagcgctgtaatcactggggagaaaaaggttcatttgcgcaatagcattaacatcaacgctttgccccgggcaatcttgagttcctaccaggaaaagatcttctttcagcaaagcctgactggataccccagccactggggaatgctcataaatcaccgccatatcgagttggtgatttatcagtttttcgttaagcactgcaccactattttcatgaagatagataacgacctccgggaattcagcgcgaaccgcctgtaataagggcatggtgatggatgacgcagcggttcctggcgcaaagccaatcgagacttgccccgataatgactgaccaacgttatgcaccgccagttgggcctgctcacactgacgtaaaatggcccgtgcatgggtatagagaatttttccggcgtctgttggcgtaacgccccgttttgtgcgaatcaaaagctgttgatttaactcaccttccagtgtggcaacctgctggctgagcgctggttgtgcgatatgcaatacttcagcagcctgggtcaggctaccaatatctacaatttttacgaagtatttcaggcgtctgaagttcatgttgcctccggtttttaagaatcggcccaagtgccgccattacttacaaccagaaagcaagatgcttgccagttctattttggcgttgatgcgcaagctaaccaactgtcaaataaaagattatgatagattcgtcattggccctttttatcagcagtcgcattcacctgccctataaaaggagggtatgcaccacgatggttcattacacaataagattgaaagctcaccactttgttgaaattggcagcaaacaaacaaaaaaatgcatttcaccctttgacatcaccatgcactgccattaatatgcgccccgttcacacgattcctctgtagttcagtcggtagaacggcggactgttaatccgtatgtcactggttcgagtccagtcagaggagccaaattcaaaaaagcctgctttcgagcaggctttttactttctaattatcaacgctcttaaaacatctgtcttgaaccagaactaatttgcacaggcattcccgatcgacgttgcaacgcagcatttgcgcgatttacatcaacttcttgcccgttgataaacgcccgcaaagatggggttaccggcaatggcacttttcggtcagactcatattctgcacgattgcgcgacagcggctcatgaacttccagccactttgaaccatccggttccgttgtgtatttcactggctgatcaataatttgtacacgagtgcctacaggaacattatcaaacagatatttgatatcgtcattacgcagacgaatacagccctgacttacacggagcccaataccaaaattggcattggtaccgtggatggcatacaacctgccaatataaatcgcgtacagccccatggggttatcgggccccgcaggaacaaatgcgggcaaactctcccctcgtttcgcatattcgcgccgggtgttcggcgttggcgtccaggttggtgcttcttgtttacgttcaacggtagtcacccagttacgcggggtttctcgcccagcctggccgataccaataggaaagacttccactgtattactgtctggcggatagtaataaagacgcatttcagcgacgttaaccacaatccctttacgaacagtggcgggcaaaatcagttgctgcggaatggtgagttgtgagccaggcttcggcaaaaaaacatcagcgcccggattcgcttccagcatattacttaacccttgcccgtattgtgcggcaaaagtctccagcggctgagtattgtgatcaggaacagttacagtaagcgactgccccactaaacggctaccctctggaggtaatggataagttaccgccaggctattttggctggcaaaaagcagagcaaatgagcaaaaaatatttacacgacgcatcatgtccctttcctaagtcgcgaaagctatccgttaagtatagcttttatcagacttttcgtttttaactgttcaaatcagaagtcgtattccccggtagaacaatattactggcagcaagttcgcccatgttgttatatatcgcacaggcagcttcgatgatgggcatcgccagagctgcgccactcccctcacctaaacgcatctccatattgagataaggctccagccccaaatgcgacagcgctatacgcgcccctttttctgccgacaggtgagaaggaatgagatacggtttgattgcaggagacatctggcaggctgcgagcgcagcagcataagaaagaaatccatccagcaacacgggtaaaccgcaggaagcagcgcctaacatcacgccagccattccgaccaaatcaaatccccccacttttgccagaacatcaacgccatcctgcggatttggttgattcaacgtaatcgcccggcgcacaacatcaattttattagccagtttatctgtcggcaggtttgcgccaatcccaaccacttcttcaggatcccggccagtgattgtgctgactattgccgctgccggtgtcgtgtttgccatccccagttcacctacaccaaacagcgtgacaccgttttttgccagctcccgcgtataacatatgacgtccaaaagcaacttttcagcctgacggcgactcattgccggagctgaagcaatattgccgctacctcgtgcgacacgcatgttgataagcccggggataggctcagcactatcaataccaacatcaactacgtggacgttagcgcccgcttgtgctgccagcacacacacgccggttgttccgcgggtcatattttcagcctgaatggctgtcacttcttttggggaaatagcgaccccttcctcccagacgccgtgatcggcacacataaccagtaccgcttttttgcccacatgcggtatgccattcaaccccggcattcccgccagttgtatggcaagcgcctccagccttcccaggctaccaacaggtttgagtaacccgtcaatatgccgttgtgcacgcgacatagcggcaggatcgatagcagggatcgtattcagtaaatcggcaagtgtttgcatgtcacgtctctttatagcagtgccagcaggaagaccagttcaccaagctctatagcagctcccagcgtatcgccggtttgcccgcccagcgtacgtttgagaagctgaccgaggatgaaaatcgccaccatcgtcaccaccatagcagccacaccatgcatacccggcaataatacggcagcaaaaatagcggctaagccgagtgtgacgcaggtttgtcgcccatcaattttgccaatgaacacattgccaagcccttcttcccgggcataacgatgacgatacatcaataatgcggcagtcccgcggctgaccgcacatgctgccgccagcgatgcaaggatcggttcgccacgcagagccaactcgcttaataccagaatctttgccagtacaacaaaaatcaatgccagaccgccatgggtgcctaaacggctatcacgcatgatttccaacatgcgatcgcggctacgtgcagaaaatacgccatcacaggtatcggcgaggccgtctaggtggaatcccccggtcatcagcgccagcacaagtacgctaaacagtgccgccagtggtacgccacaccatgcctgcagcaccatgaagaccagcccgctaatcgcgccaagcaataatccaattaaaggaaaagtaataataccgcgagaataatgctcgaaatccagtccctgggaccagcgacgcggtacgggcagacgcgtaataaatgagagcatcgcccaaaataatttactcatttgatttttactccaatacccgaaaccaccagccatactccatttgccgcagcggccagctgctgatttacccgcccggcaatatcacgaaaatgtcgtgccagacgactctccggcacaatccccattcccacttcgttagtcactaatacaacctttgcggggcaacgttggcaggcagcaatcaacgactgaatctcagcattaatcgcctgttccatcgcctgataatcccattcatcagggtctttatcgccgccataatcaaacaacagattagtcaccattgtggtaacgcattccagcaacacagcttcatgcgggttaatgtctgcatgaattaattcatcaagatgttgccaacgctccaccgtgcgccagtgcgccggacggccttgccgatgatgttctatccgtgcagccatctcgtcatcaaggatttgcgaggtggcgatatacagaacctgtgaagagtccccaataagcgcctctgcgtggcgactcttcccgctccgtgcgccccccgtcaccaaaatcatcataccgactcctgattcaattgtgtgatggtattcattgaacagaacaatggatcccccaccattgctgaccgcaaaacatttacacgatcaatactgcgcgtaatataattaaaaatccagcattctcaatccattacgaaagaagatggcattgtggaatagccagacttcctcgtgttaacgtccgacaaaatgcgtcattgacagcggtttctgtggattgacacatttcattcagataatgaattaatgctactgccggaccaaccagcaaacgggcattgtgttctgaaatccaggctattgattcaacgtcaacgacagatctgcgctgtaaaagaacttgtaaaacaacgcaatagaattatccggaatggtggcgactatgcactagaacaccacaatttcgctctctcggtaaggcactgtcacagcattcaacagaatgtgacttgccagatttattagcgccaccagatgtttaaccgggtaaccacgacccagtcggggatatattccatcttctcgctgacatcatcaagaataaaaaggtttatcacactcagagcaacgttcttcagcaggcgggataattcttcaacatttaaaagatgtgttattaaaggcatacaaactggacgtattgtattttcttttggtggttgacctaaggtagcagtttatcctgatgcgctgagatttctgtaatatctacgtcaacattctcctcgaatagaaaatgcagcctcggcaagtgattcacattttttaacaaaacgttgttagcgtgccattttcagaagctctccaagaaagcgaattcttttctcaaattctgcattctcagacacagctttctactccatggcaatggcccaaatacgaagttgctcaggatcattagtggtgctgagaagttaaataaccatgcggagtaccactcgtcatcacgtatttatatatcatgaagctattgttgtgttttgtacatcagtagatgtattctgatatactccttttgctagacataacctttcacctgcttgcaaagcttctgtgttctgacattgccaaattgttgcaattctgtatccagccttctttcagtcatagcttcgggccgcgataagactcactgatctggccctgattcctcttgcagactttatagaccaattaaaatgcagtttctgcaggtcaacgtctgaccatcattgtcatcactctggccattagagtaaccttctgcattcatccttttgtaaaaagtttatgtcagtatcagcaattaaccggacctgatactgatatgagtcttaccgcatatacggtcaatttcagcaattaattacattatccacgccaaagtgtttgtcatcgcaatgatggtaccttctttcagacaccattttttcaactccgttttccacggaccgcactcttatgtcaagagtgcggtgatcctacccacgtaatatggaccgcaaacctattgaagatgtgatcttcgaaattaataactttatctcgctcggtggtcgcaccattgttgatgccacagggtctgagtctatcggacgagatgcgcaggcattacgagaagtcgcattaaaaacaggtctgaatattgttgcttcctccggtccctacctggaaaaatttgaaagccagagaattcataaaacggttgatgaactggcggcaacgattgataaagaattgaattaagggattggcgatacggatattcgtgccggaatgatcggtgaaataggtgtctcaccgacatttaccgaagccgagcataacagcttgcgggctgcctcgctggcacagattaacaatcctcatgtggcgatgaatattcacatgccgggctggcttcgtcgcggtgatgaagtactcgacattgtgttaggtgaaatgggcgtctcgccaaataaagtctctctcgcacactcggatccgtcaggaaaagacgtggcgtatcagcggaaaatgcttgataagggtgtctggctggaattcgacatgattggcctagacattaccttcccgaaagagggaatagcgccaggggtgcaggagactgccgatgccgtcgctcatctcattgagttgggatacgccgatcagcttgttctcagccacgatgtcttccttaaacaaatgtgggctaaaaatggcggtaatggctggggatttgttccagatgtttttctggcctatctggcggagcgcggcgtcgataaaacgatcctcaaaaaactctgtatcgataatcccggacgattattgaccgcataaaaccattatcccccggcacactgcgccgggggatgtcaattaataccccgccgttaaatcatccaccaagcgcgagtcggatgcgccgtacaactcaccatccgacccaaccataatgctttgcgtgctgcccatcgcctcattcagcgccactttctgaccttttgcttccagcagcttgagcgtatccggactaaacccttttcaacacgcagctcgtccggcaaccactgatggtggaaacgaggcgcattggtcgcttcggcaacattcattccacaattgatgctgttcaccaccatttgcagcacggtagtgatgattcagctaccggtaacaaagtgagtacataaaggccatactgtcacgaacagtgcaaaagtggctcttccgcaacctaggtgaagattttcatgccagtggactcattaccctccgcctaagtagttcaaatccggctcgaccatacatctggcgtatcagcaccttcaggcgatttacatgaccttcgacaacaccattactccagcgactgctgattgcctcacatatagccgcagcatcagcttccatccccgcagctacgcaccgaagttctgctgagccgctttcgtggactcgagtgaaccagctgcttagctgtgatttattttaggttttcagaatacggtagaactcgagtaccagttgctgtgctattttcaactccggttctttttcacacatcagactaataaatcgggatgcataattttcttcgcccctgattattctccagggcatcaaccagcggcttacccggaacactgaaggaagtcttgcggcagtagtaaccggtgggttccagcctttacgccatttggcaacagtatccctgacgatggtttcactgcctgtccccccccctgggccaccatttcccgccatatccggctggcattataattaccactttctcgttgctcttttaaccactccctccatgggtccagaagccctcgctttggaggccgggttgacatttcagggaatgttcctgaacgcacccagcgactgactgtcactcgcgacaggcctgtaatacgggatatttccctgaaactacatcccttgttatgcagggccataacctctgtccaatgctgatgccgttttttgcgggtttgctgtttaaggcgttccggacgacggagcgatgctacaggcacagatatttctggctcaggtgatttcttcagtgataactctctgacaacaagacgtatcagaggcatatgtctgtacatcattcgttcaggctcatcaccaatattttttagcaggtgccatcgatcggccacctgtctggcctgaggtgcaccttcacgtgctgctgtcgcatagactccactgcgatcacgcaaggcaacctgtatttccggatattttctgaaccaggtcgccagcgtacgctgatcacggccgggaagcaggacgaggggacggtgagtatcaagattgactattaacataccgcagcagtggccccgatgccacgcccactcatcaataccgacatgaggcgcgcctgactgtttcgtctccggggtattgataaccctgcgaagaagagtatcagcactgcaacggagacccgctgccgttgcagcccgttttccagcctcacctccagctattaatcccagttgacgttgtaaattttgtaacgcctgtgaagactgttggtgtgaaccggcgaagggagcaagcgactcggcaaaaattttacgtgaacaagctgggttacggcagtaccagtggcggacggaaaatacaagccatagcgtctgtcctgatcagggtagatgctgtatccggcgccgacaacaactatgaacagagtcgctacgcttaaagcattcaggacattgtgctgttttgcgttttccgtggagatggagggttataccgtcagagctaataatttgtcgactgcatcgccatccgcaaggtaactgtagaagtgtcttaagagagtgcattgggttgcccataacttaaaacagcttagatccttgttcgccagaaagtttcatccattttcttccacccaggttgcggaagaaccacttttcatccgtcgttgacagatgtgaagtatgcgggagaaaaagtgaatatctaactgtaataactcagaccggtacgagtactcggggcgtctacaatcattcagggcaaagtgctaaaatttctctatcccgggatgcccctaccaacgcagcactcccggagatatcattacagctctgcaactgatttccgcgactgaaccgctcagttcctatccttccagttgccttcctgcagccccccctccctgctgtataccccagtaccacaacgcgggcagcacttttccccctcataatcttcgtcacacatcacacaaaaccactttctcaccttcaccgtataatccggaaccgtcatgccctgcagatgcaaacgacgggcctctttctctgccgggtcaagctaggtgcatcgcagcaggattttcgcagcaacagtcatctggtcatgttcaaaccacggcggttgtccgtcatttccccgcttaagtgttaacggacaaccacaggacacacagcacaaaacgtcctgtcggttgtgcttcgcggcttctttcgccgtaacaaaatggcctttgctgtcattcgccatatagcagttcagaattcgcatatctcctccttgtatcttgacaattggttaaaataactgtgattagatttggcaaggtgtatgcagcccgatccctcaaggggttcatagcccgtagctcagcgaatggcgcatacactgagccactcatctgaaacccgaacagttgtcagtacgccataacgcatttgcaaggatgggtaatcatgagtcagccaggttcactttgtgtggatatcgatgtttcgaaagcgatactggatattgccgccagcagcgctattgaacaattttctgtcggcaatgacagtgatggctttgacgccatcattgctgagttgagaatgtacgccattgcgctggttttaatgaaagccactggaggacttgaaaccgccatagtctgtgcgcttcaggcagaaggttttgagcttgccgtggttaaccccagacaagctcgtgactttgcccgcgccatgggatacctcgcgaaaactgatagtattgatgccagagtgctttcccagatggctgaggttctcaaccggcatccggagcgggaacgctttatcagagcactgccggatactgaatgtcaggttctcactgcaatggtagttcgtaggcggcagttgattacgatgctggttgccgagagaaaccggttgcaccctgctcatccatagaacaggaaaagcattaatatcatcatcaaagcactggaagacgagcttgcgcgactagatgctgacatgaacagccatatccatagccacttcaaagagcttgctaagcgactgagcagtattaaaggtgttggcaccatgacggctgctgcgctgctggcggaagtacccgaacagggtaacctctccaggcgtgaaatcagtgcgcttgtcggtatggttccagtaaaccgggactcgggcacgatgagagggcgacgaaccatctttggcggcagggctggtgtgcgaacagccctgtacatggcagcgcttgtcgcaacccgctttaacccggtaataaaggtgttttacatgcgactgcttgccgcaggaaaacccaaaaaagtggcgctggttacctgtatacgcaagctgctgactatcctgaacgcaatgctcagaaagaacgaagaatggaatgaatcgtaccatcacgttgctccataatttttacgttcaagacagttgctgagctgtccggggaagactgaaacctccggtctggcagtgtgtgcagtaccgctccccataataatcgtggtgacattgtctgcagtgccagctggctttacgcaccacgggtaaggcatccggtacgaattgctgcagacgtttaatcaactgtatttctctgcgctccggcctgacataagggcactgttgaccgtgctctgtcagcctgtcgtcagtgtgttcaaaccagggaagttcagtgtcgtattgcggatggtatctgagtgcactgccacacaagtggcaggtgtagtgagcataaggtgcggcctgtgctgtacgggcgcccgtcagacgtccgttgccatcaagagcgagaaaggattttgcgtacatagtatatgttccttaccgtcagacgacacgcaggcaacagccgtcccggtacgggcagcgtggtccggtgtgaatggcggtttcagttcagtctcataagggaaaatcagtgtggtggccgtgaacacgtcatcacactgaagtcagataactcgtctgtctggctcagccacgactgcagccaaagttgcgctcaccggtgcaatgaactttggtatgctccttcgccagatagtcagcacgttccagcacttgctgaaagccggtgtcatcattacgcgccagccacaccgccggccaggccggaaaatgcaccagcgtggcatggcacccgacatccactcccagggcactgcaccacgcctgtttaatcatcccggccagagatcccggagcgcggtaatcaccggcacgacaccaggtatcccggttgaccagcagcatcaggtgatagtgttttttacctttgcactccccaaactcccgggcccagacgtaatgcagggttgtgggatgcacgcgtttaccttcccgatgcttacgtttctggtaagcgtcgattcgggctttcagggcattgatgaagcgggatatcacagctgcgtccgttgctgccggtacatccgggagacgcaggtcaacccgcaatgccgtcaggcggggatgaacattcagtgcgtgccgcaccgtctcacgaatacgttgctgccagaaggggttgtatttgtaggtcatggttaaatctccgtatggttcatacggaatagccacgtcgtaaaaaatgcgcagagtccctgaagtgacctccggcaggacactgtctcaggcactctgtgataacccgaacggtcgtctccggactgacggttgaattttcagcgttgttttttaatgtaaaaaaccggttacgggtaaggctgtgaggagggagtgatggtgatacgcaaaagaagtgcagggactgtggaaacgcgattactcataatacagtgtgttgcccgtattgtggttctgtcgaccccttcggctactaccggaatacagaccgtatcgttaccatactgctggcgctgattattgtggtcctgctgactactgtcagcgtcagtgtgtgtatactgtgtagctggtgagataacggttcatgtatcccctgagctgacagtgtaccgtgtatattaagcgtaaccgacaggttctccttcataccatattaaattttccagggattgccgctgccttatttcgtcccatacaggaaaactcatctgggtttctgacaaatacgcgaaactcacagcccctcaatatcaaccacacgttgtaagccggtaatacctgaaaatcagcctattaccgcccacgcctccggcaccattcccttttgatttcgaattctttgttgtcgctataccgcttaatgttcccggtcctccggtgcagataacaccggagtcatcgtagcgctgcttcaatattcaggtgacatatttccagacggaagccggcgcgcgatcgtaaagtttgttcattgtcagttctgccagccggttgtcaacggcagagttaaaggcttccagctccgcaagggtaagtttataacgcgtgtgggaattcacttttcccgcgtctcctgacgtattacgggctgccacttacctggtgtcccgcaatacagccttagtgttccgttatcggggatccggacgcaccgcaacaaccggggaagtatttctggtttagagcagtgtcaagagggatttctcagcccctcactcactggctcagtctcagggcaggagcattaatacgctcagttcatgtcttatacaggaatgggcacagggggagctggcgtgtcactgctgattttacgcatcagcgttcatgtatctgcactctgatacatgaacgattcacagcgctctgttaccggagagatttactctcttagcttactctggcaaatcctttacgttactctctgatgacttcttatatttataataccaatcagacagccttatcccatcggtgatatcagtctcctcctcgccaggaacgggctgactcactgtaaccacctccgaaaacaactctgcaattatcagaacgcctgcttctctccctgtcctcacgaaaactatcccctctttatcgcgcgtgcgtgcggaagcatcttttcgcaacaaccacccggtataccggtacggctcagccaccgcaacctccccgtttatctcctggcggtcacattcccgattattttttacgtttctccccggttgttatgccggtgaaggtggcgcgctgttttcatgaccacaccggctggtttaacaacatccggaggaacattctcatggctaccccagtttcactgatggatgaccagatggtcgacatggcatttatcactcaactgaccggcctgacagataagtggttttacaggctcatcagggatggggcctttccggctcccatcaagctgggccgcagctcccgctggctgaaaagtgaagtggaagcctggctacaggcgcgtattgcacagccccgcccgtaatttctgaccgttatccgttcacccgcagcagacgtaatccccggcctgccggcggcattctgctgcctgttatatccccgtgaggaatatgaaaatgaaacaacagtatcagacccgctacgaatggctccacgaaagctaccagaaatggctgaccggcttcacccggcacgccgtatcctggggcgtgtgtcatccgaatatctactacttccataatctgacgcccggttgggtgtcattcaatggtgaaaaaccggagattgccatcgtaccccagagcctgcaccggctgatttatggccctgacaaacgggccacgccgcccctggatgatgatctgatagtgaatttatgcaccagtgaacatctgctggttcatcatccgatgctggaaggcattctcctgtctgaatgtgaacgtctgaggcagcgttctctggcaaataaactgatcagcctcttccgtcagtttggtggcacggagttgcgcctcaaactggtctggctttgctggcttgatttaatgaccggaaacagccttgaagactggaaagagaacctgaaacggaaatcagaaaaagagctggaggaatggatcatcaaccgtcagaggcagagcgcagcactgacggatctgatggatcagtacgtgctcctggcataccgcacaacggttgacgatagccgcaactgatgccggttgcttccggaaggtgtgacaaaatacggaaatgatgatgctcccggcccccatgctcacctgcagagcgtgttcgtcgtcatcatactgagccatgacgggcgtcttaagggcatcctgtcattgctgagcaggcaacaccaccagaggagccacggacagggatgttctttacagcccgatacacgccaggttctcagcagactgaatgtgcaggtgcggttattcaccagaaatggcatgctgcggtacatacccatcctggtgacgatatgtacgtggcgacagcgatcccggcactgtggaagagactcactcagcctgcaggatattctttccggcatccgggaatgtccgcctgaatgcaaacaggatgatatttgaatccgtaatactgttctttcatcataaataatttatgcagatacagttaaccgttacagtagccggtttgttttaccgggaaataatatccgtcagactgatgccggaacatatctgaaacacgttatgatgttttgttatcagaaatgttgtatattcttatccgtgacgacagtttaatgccctctggtatcacctgataatgcatatcctgcgatgattcgttatatttacgggacacgcctcttttcattgtgctccttttcagacttcattttccgtaagtgttccccggcataaaggaggtacctttctggcgtttataactctctttatcggtgacgccggtaatacagggaataccacaccgacaaacgaggtattaacagacgatatttcagtgtccataatttttctgtccggttaaataacgtcagtctgctgccctctgactgtaatcatcaaagccggaatgcataccgggttacaacgtaaaaaaagtgatgctggccctcggtgcagctggcgggcgaaacatgtttacctttcaataccccctgtctgcagtctccactcttccatcctcttaagctacgtcggccacatgagtgcacttccatgataacaggtattcctgtcagcataacgaagccggttaccttcccttcctcctgcatttcctgtcagaatgactatacagcgcgcagattgcctttttattgaccaccttaatataccattataaacttctttttatcatgttattatcaccttattatgtttaatttttaagcagccggagaaagaggatggttcagaaaattttgtcggataaggttatgaatgaaagaacaaatgcgtattactcttattatcttggagagcgtaatatctccgtactgccccttaatgtttatgatcccccggaacgttttatcgcttacataaaaaaaaacagagaaaatctgaacatcacactttcagattttgaacttgaacaaataatttctggtatgcgtctgaaggccctggccttcctggtccccctggaaaaaatatcctggatcgcgggcagtgaacgcgcatgcttattttcctggtatctgttgatgcagtttatccagaataacagggcaaaaataagcgcagacttgcttcaaaagaataaactgtatcttaaagaagagtatctggaagggaatgccttcccgtcggactcatcgacacagttcagacaaatactcagagttctcgatattctttctgataagaatttgcgggatgagtggataatccagaccaaagacagatggatacgggcatttaaatcaaagagtcctttcagttacctcctcccggagaacgaacatgaatgcatatggacatggaattatttgaagggaaaaaatattgcactggaaaaactggccagttttcctggttctgctgatatttaccacgcaattcacctttcatttgacatatgggttacctgtccactcacctcacctgacgatataaaaaatttcagaaacagtttcaataaggccaaggcgcagcgcaagtacaaaaaaatgcaggaagataaagtcaatgtacagttttttcttgacgcagaaaccagggcgcagctcaaagaattatcgagggtcagaagactcagtaccggcgaaatgctgcatgacctgattgttgaagagtataaaaggtaccgacattccagataatttcagacatatattatctccgtgagtcccccgccacctttccggtgtgcgggggttttgtcttttttcaccgggaatacatgtatgaatccgtctgatgccattgaggcaattgaaaaaccgctctcctccctgccttactcactttcccgtcacatcctggaacatctgcgcaaactcaccagtcacgaacccgtgattggcattatgggtaaaagcggggccggtaaatcctcactctgtaatgcactgtttcagggggaggtcaccccggtcagtgatgttcacgccggcacccgggaagtgcggcgcttccgtctgagtggccatggtcacagcatggttatcactgacctgcccggggtgggcgagagccggaacagggatgcagagtatgaagccctgtaccgtgacattctgcctgaacttgacctggtactgtggctgattaaagccgatgaccgtgccctgtctgtggatgagtatttctggcgacacatcctgcaccggggacatcagcaggtgctgtttgtggtgacgcaggccgacaaaacggagccctgccatgaatgggatatggccggcattcagccttctcccgcacaggcacagaacattcgggagaaaacggaggcggtattccgtctgttccggcccgtacatccggttgttgccgtatcggcccgcaccggctgggaactggatacgctggtcagtgcgctaatgacagcacttcccgaccatgccgccagtcccctgatgacccgcctgcaggacgagctgcgcacggaatctgtccgcgctcaggcccgtgaacagtttaccggtgcggtggaccggatatttgacacggcggagagcgtctgtgttgcctctgttgcccgtacggttctgcgtgccgtccgtgacacggtggtctctgttgcccgcgctgtatggaactggattttcttctgaacagtctgccagggaaatgcctgataacattacgttaaccaactgaaaacatgacacaaacccctcatactcctcctgtttctcttgcgtgaccgccttgtcgttaatagaataaaacgatcgataaaacaggtatcgatcgttactatcgatcgtttatagtggttaatggtctgcgaaaaggcagttgaatctcttcatcatgcagaacggaattgcacacaacggactgatacttctctggcggatgagagaggggaagcatttatgcccgggaaaaaccactttatctgaccatgctgttttgtacctgccggtatccacatttgtgggtaccggcttttttattcaccctctgtaaggaaaagctgatgaaacgacatctgaacaccagctacaggctggtatggaatcacattacgggtaccctggtggtggcctccgaactggcccgctcacggggaaaacgcgccggtgtggcgattgcgctgtctcttgctgctgtcacatcagttccggcactggctgctgacacggttgtacaggcgggagaaaccgtgagcggcggaacactgacaaatcatgacaaccagattgttctcggtacggccaacggaatgaccatcagtaccggtctggagtatgggccggataacgaggccaataccggcgggcaatggatacaaaatggcggtatcgccaacaacactactgtcaccggtggtggtcttcagagagtgaatgccggaggaagcgtttcagacacggttatcagtaccggaggcggacagagccttcaggggcaggcagtgaacaccactctgaacggcggtgagcagtgggtacatgaaggcgggattgcaacgggtactgtcattaatgagaagggctggcaggccgtcaaatccggcgcaatggcaaccgacacggttgtgaataccggcgcggaagggggaccagatgcagaaaatggtgataccgggcagtttgttcgcggaaatgccgtacgcaccactatcaatgaaaatggtcgtcagattgtggctgctgaaggaacggcaaataccactgtggtttatgccggcggcgaccagactgtacatggtcacgcactggataccacgctgaatggggggtaccagtatgtgcacaacggcggtacggcgtctggcactgttgtaaacagtgacggctggcagattatcaaggaaggtggtctggcggatttcaccaccgttaaccagaaaggcaaactgcaggtgaacgccggtggtaccgccacacatgtcaccctgaaacagggtggagcactggttaccagtactgcggcaacggttcttggcagcaaccgtctgggcaatttcacggtggaaaacggtaaggctgacggcgttgttctggagtccggcggtcgcctggatgtactggaaggccattcagcgcagaaaacacgggtggatgacggcggaaccctggcagtgtctgccggtggtaaggcaacaggtgtcaccatgacatccggtggtgccctgattgcagacagtggtgccactgttgaggggaccaatgccagcggtaagttcagtattgatggcatatccggtcaggccagcggcctgctgctggaaaatggcggcagctttacggttaatgccgggggacaggccagcaacaccactgtcggacatcgtggaacactgatgctggctgccgggggaagtctgagtggcagaacacagctcagtaaaggcgccagcatggtactgaatggtgatgtggtcagtaccggcgatattgttaacgcaggggagattcgctttgataatcagacgacaccggatgccgcgctgagccgtgctgttgcaaaaggcaacgccccggtaacgttccataaactgacaaccagtaacctcaccggtcagggtggcaccatcaatatgcgtgttcgccttgatggcagcaatgcctctgaccagctggtgattaatggtggccaggcaaccggcaaaacctggcttgcgttcacaaatgtcggaaacagtaacctcggggtggcaaccaccggacagggtatccgggttgtggatgcacagaatggtgccaccacagaagaaggtgcgtttgccctgagccgcccgcttcaggccggcgcctttaactacaccctgaaccgtggcagcgatgaagactggtacctgcgcagtgaaaatgcttatcgtgctgaagtccccctgtatgcctccatactgacacaggcaatggactatgaccggattctggctggctcccgcagccatcagaccggtgtaaacggtgaaaataacagcgtccgtctcagcattcagggcggtcatctcgggcacgataacaacggcggtattgcccgtggggccacgccggaaagcagcggcagctatggcttcgtccgtctggagggtgacctgctcagaacagaggttgccggtatgtctctgacgacaggggtgtatggtgctgcaggccattcttccgttgatgttaaggatgatgacggttcccgcgccggcacggtccgggatgatgccggcagcctgggcggatacctgaatctgacacacacgtcctccggcctgtgggctgacattgtggcacagggaacccgccacagcatgaaagcgtcatcggacaataacgacttccgcgcccggggctggggctggctgggctcactggaaaccggtctgcccttcagtatcactgacaacctgatgctggagccacaactgcagtacacctggcaggggctctccctggatgacggccaggataacgccggttatgtgaagttcgggcatggcagtacacaacatgtgcgtgccggcttccgtctgggcagccacaacgatatgacctttggcgaaggcacctcatcccgtgacaccctgcgcgacagtacaaaacaccgtgtgagtgaactgccggtgaactggtgggtacagccttctgttatccgcactttcagctcccggggtgacatgagcatgggtacagccgccgccggcagtaacatgacgttctcaccgtcccggaatggcacgtcactggacctgcaggccggactggaagcccgtgtccgggaaaatatcaccctgggcgttcaggccggttatgcccagagtgtcagcggcagcagcgctgaaggttataacggtcaggccacgctgaatgtgactttctgataatcaggtcactctccttcaggccccggtcatcatgaccggggctttttactttcagggagcaacagatatgccgggttgtacatcacgtttattgcccgaaggccctttctcacgcgaacaggctgttgccgtcaaaacagcttaccgcaatgtgtttactgaagatgaccagggaacatattcccggctggttatccgtaatgctgaaggtcagttgcgctggtgatgccggaacacagcttaatactcagctcgccagttaagggcttctcagacaataaacgtcattcatttcatctgtcaggccgcgtcttctccgggagacgtggctttttcatttattacaccagtaaatcgtaaccaccgataaggagcaaattatgcgactagccagtcgttttggttatgcgaaccagatacgccgtgaccgtccgctgacacacgaagaactgatgcactatgttcccagtattttcggtgaagaccggcatacttcccgcagtaaacgatatgcgtacattcccaccatcaccgtactggaaagcctgcagcaggaaggttttcagccattcttcgcctgccagacccgcgtgcgcgacccgggccgccggggatacacaaaacacatgctgcgtctgcggcgggccggagagataaacggagaacatgtccctgaaattattctgctcaactctcatgacggtacctccagctaccagatgctgccgggttacttcagattcgtctgccagaatggctgcgtctgcggtcagtctctgggggaagtgcgtgttccacaccggggaaatgtggtggagaaagttatcgaaggggcttacgaagtggtgggggtttttgaccggattgaggaaaagcgtgatgccatgcagtcgctggtcctgccgccaccggcacgccaggcgctggcacaggcggcactgacttaccgttatggtgacgaacatcagccagtcaccaccgctgacattctgacaccacgacgcagggaggattacggtaaagacctgtggagcgcatatcagaccatccaggagaatatgctgaaaggcggaatttccggccgcagtgcaaaaggaaaacgtatccacacccgtgccattcacaacatcgacaccgatattaagctcaaccgcgcattgtgggtaatggcagaaacgctgctggagagcctgcgctgatgcagcatgtccctgaaagcgtgattcaggcaccagaatcacccgacgccccggaggcgctgccggggtgtcgttccatttctgatgatgacctgtgcgcctggtgtacccgtctgctttaccgtcccggagaaatcagtctgtgcagactgagtatacaggcaatggcatctggccatccgtctgtgaccggaacggttacgcgtacggctgtccggaatttcagccgaatatcattcatccctgatattaccgggtcatcacggtcagtgatgaacgtgatgttgccagctcccgacctttactccctctcatttattcacattacaaggatttcatacatgaaaacattgtctcagaacaccaccgcttcggcctgtgcaccggagactggcctgcaacaactggttgccaccattatccctgatgaacagcgcatcagcttctggccgcagcattttggcctcattccacagtgggtcaccctggaaccccgtgtcttcggctggatggaccgtctttgcgaaaactactgcggtggtatctggaatctgtacaccctgaacaacggcggggcatttatggcacccgaaccggatgacgatgatgacgaaacatgggtactgttcaatgccatgaacggtaaccgcgctgaaatgagcccggaagccgccggcattgctgcctgtctgatgacgtacagtcatcatgcctgtcgtacggagtgttatgccatgacggtccattattaccggttgcgggattacgccctgcagcatccggaatgcagcgccattatgcgcatcatcgactgaatggagagaagtacaatgcaacagctttcctttctgcccggagagatgacgcccggcgagcgcagcctcattcaacgggccctgaaaaccctggaccgccatcttcatgaacccggcgtggccttcacctccacccgtgcggcacgagaatggctgattctgaacatggcgggactggagcgtgaagagttccgggtgctgtatctgaacaaccagaatcagctgattgccggtgaaaccctcttcaccggcaccatcaaccgcacggaagtccatccccgggaagtgattaaacgcgccctgtatcacaatgccgctgctgtggtgctggcacacaatcacccgtccggtgaagtcacacccagcaaggcagaccgccttatcacggaacgtctggtacaggcactggccctagtggatatccgggtaccggaccatctgatagttggtggcaaccaggttttctcctttgcggaacacggtctgctttaacccgtcaccgttacaaccacatcacacctgttttcacttttatcttctgtcttcagaggtatcccactatgaaaatcatcacccgtggcgaagccatgcgtattcaccgtcagcatccggcatcccgtctttttccgttctgtaccggcaaataccgctggcacggcagtgctgaagcgtataccggtcgtgaagtgcaggatattcccggtgtgctggccgtgtttgcagaacgccgtaaggacagttttggtccgtatgtccggctgatgagcgtcaccctgaactgatgttccgtcacccggaaaacgagtacgactggctgagctcagacgccgctgtggatgaggtcctgctcatcaacgaatacacctttaccgaagccggtctgcgcgccggctgacccgtcatcgttaaactatcattcaccgattttctgtgaggattttatcgtgtcagacacactttccgggacaacgcatcccgatgacaatgacgaccatccctggtggggactaccctgcacagtgacgccctgtttcggcacccgtctggtgcaggagggtaaccgcctgcattaccttgccgaccgcgccggtatcagaggcctgttcagcgatgcagatgcgtaccacctggaccaggcctttccgctgctgatgaaacaactggaactcatgctcaccagcggtgaactgaatccccgccatcagcataccgtgacactgtatgcgaaggggctgacctgtgaagccgacaccctcggctcctgtggttacgtttatctggctgtttatccgacacctgaaacgaaaaagtaaaccaccagaataaccttctgctccggcctggtgttttcaccacgccactgtcccattttttatctctgcatatcaggaaaatcttcagtatgaaaacattacccgacacgcatgtacgggaggtatcgtgctgcccgtctcccgtcaccatctggcagacactgctcacccggttactggaccagcattacagccttacgctgaatgacacaccgttcgtggatgaacgcgtgattgagcagcatattgaggcaggcatttcactgtgtgatgcagtgaactttctcgtggaaaaatacgcactggtacgaactgaccagccgggattcagcgcaggagcctcgtcgcagttaatcaacagcattgatattctccgggctcgccgggcaacaggcctgatgacccgccacaactacagaacggtgaacaatatcaccctgggtaagtatccggaggcgaaatgatgaaactggccctgacactggaagccgacagcgttaacgtacaggcactgaatatggggcgaattgtcgttgatattgatggtgttaatatcactgaactgattaacaaggtcgctgaaaacggtgattcactccgcgtggtggatgaacgtgactctaccgaaacaccggcaacttatgccagccctcaccagttgctgtaagacaatgcagtgatacagggtatagtgccattaaccacagaaacagcactgttgtcctgtattaagcaggcaagagaagatgtccttaccctgcgccatctgcagcttctgcaccagaaccggtgaatctcactcaacaggcttcattttccctgacgccagcctgaatacagctggcgttttcatttataaacagaaaggaaaaccgataataatggaatggacgcccctaccatgaagcaacggtaggatattactgataaaccttccagtggaggtgcgttatggccgttttaacgattagcattgacctgacaaaaaatgaattccaaatccacggtctggctaggaacagaaaaatctaagctcagaaaacggattaaacgttccctgatgcccgtattcttcgcgaatatgtcttcctgtcggattgggatggaggtctgcgccggagcgcgtcattagtgagaatgctgtctacttaggggcataatgtcagactaatgcccgcgatttgtaaagccatatgtgaaaacaaacaagaatgatatggctgctgccgaggccatctgtgaagccgttacccgacctaatatgcggtttgtcagcatcaagacgcctgagcagtagtcattactgtcttttcatcgtgccctgacggggtttgttaaatcaaggactgcgcagataaaccagatcagaggattactggctgaatttggcatcgttctcccgcccgacactgaaccgccccggaaatcctggagactaaactccctgagaaagaggtaaacaggatgactaaaaatactcgtttttcccccgaagtccgtcagcgggcgattcgtatggttctggaaagtcaggatgaatatgactcacagtgggcggcaatttgttccattgccccaaagattggctgtacgccggagactctgcgtgtctgggttcgccagcatgagcgggataccgggggcggtgatggtgggctcaccagcgctgaacgtcagcgtctgaaagagctggaacgtgaaaatcgtgaactgcgccgcagtaacgatatccttcgccaggcttccgcttattttgcgaaggcggagttcgaccgcctctggaaaaaatgatgccactgctggataagctgcgtgagcagtacggggtcggaccggtatgtagcgaactgcatattgccccgtcaacgtattaccattgtcagcaacagcgacatcatccggataaacgcagtgcccgtgcgcagcacgatgactggctgaagaaagagatacagcgcgtatacgatgaaaatcaccaggtatacggtgtgcgtaaagtctggcgtcagttgttacgggaaggtatcagagtggccagatgcactgtggcacgtctcatggcagttatgggacttgccggtgttctccggggtaaaaaggtccgcactaccgtcagccggaaagccgttgccgcaggcgaccgcgtaaaccgtcagttcgtggcagaacgacctgaccagctgtgggtggctgattttacttacgtcagcacatggcagggcttcgtctatgtggcgtttatcattgatgtgtttgccggatacatcgtggggtggcgggtctcatcgtctatggaaacgacattcgtgctggatgcgctggagcaggcgttgtgggcccgtcgtccgtctggcaccatccatcacagcgataaaggctctcagtatgtgtcactggcctatacggagcgactaaaagaagccggattactggcatcaacagggagtacaggcgactcgtatgacaacgcgatggctgagagcatcaatggtctttacaaagcggaggtaatacaccgtaagagctggaaaaaccgtgcagaagtggaactggccacactaacgtgggtggactggtataacaatcgacgattgctgggaaggctgggccatactcctccggcagaagcagaaaaagcttattatgcttccatcggaaacgatgatctggcagcctgagttcacagataaaacactctccaggaaacccggggcggttcaacactgtagcgatcagtcgtcatgtccctgccctgcttgaagacgcggaaaactgtttaacaatgccgttcagacagctgtcgtcctatctctaatgaaaatgtgaaacaactgagcgtacacattgaaaccatagaagccgttagcaacgaacacgtcgggaacgacgaactgtgcaggaaaattgccaccatttcggggattgctattcttaccaccactgcaattgtcagcaccgggtagtatcggcttcaaaaaccggcgtcagcttgctgcatggcttggactggttccccgacagtgcttcagcgtaggtaaaaacacgctggggtctatcagtaaacgggacgatgtctatatcagaacgctactgttccatggtgcgaagacagtgtcaaacgccagaaagggcagacaggtccaggaaagctggctgggcagaccagtctcgcggcggaataaaaatgttgccaccgtagcgctgaacaacaaaaatgccagagtgctctgggtattgctaaccaacgataaagagatttcaccagaagaagtgatgggagctgcatatatgtaaatgaaactacttctgtctgttgaaaaataaaaccaacctactgattgctaaggattaacgagtattaaaggccagactggtaagaccgcgactaagtgaacctgtatctgacatggcatagcttcgctaatgtgtcatcatgattaggactgaatctgtgaattcctttaggaagcacggacactgaaccgccccgggtttcctggagagtgttttatctgtgaactcaggctgccagatcatcgtttccgatggaagcataataagctttttctgcttctgccggaggagtatggcccagccttcccagcaatcgtcgattgttataccagtccacccacgttagtgtggccagttccacttctgcacggtttttccagctcttacggtgtattacctccgctttgtaaagaccattgatgctctcagccatcgcgttgtcatacgagtcgcctgtactccctgttgatgccagtaatccggcttcttttagtcgctccgtataggccagtgacacatactgagagcctttatcgctgtgatggatggtgccagacggacgacgggcccacaacgcctgctccagcgcatccagcacgaatgtcgtttccatagacgatgagacccgccaccccacgatgtatccggcaaacacatcaatgataaacgccacatagacgaagccctgccatgtgctgacgtaagtaaaatcagccacccacagctggtcaggtcgttctgccacgaactgacggtttacgcggtcgcctgcggcaacggctttccggctgacggtagtgcggacctttttaccccggagaacaccggcaagtcccataactgccatgagacgtgccacagtgcatctggccactctgataccttcccgtaacaactgacgccagactttacgcacaccgtatacctggtgattttcatcgtatacgcgctgtatctctttcttcagccagtcatcgtgctgcgcacgggcactgcgtttatccggatgatgtcgctgttgctgacaatggtaatacgttgacggggcaatatgcagttcgctacataccggtccgaccccgtactgctcacgcagcttatccagcagtggcatcattttttccagaggcggtcgaactccgccttcgcaaaataagcggaagcctggcgaaggatatcgttactgcggcgcagttcacgattttcacgttccagctctttcagacgctgacgttcagcgctggtgagcccaccatcaccgccccgtcacgaacggtgcaatagtgatccacacccaacgcctgaaatcagatccagggggtaatctgctctcctgattcaggagagcttatggtcacttttgagacagttatggaaattaaaatcctgcacaagcagggaatgagtagccgggcgattgccagagaactggggatctcccgcaataccgttaaacgttatttgcaggcaaaatctgagccgccaaaatatacgccgcgacctgctgttgcttcactcctggatgaataccgggattatattcgtcaacgcatcgccgatgctcatccttacaaaatcccggcaacggtaatcgctcgcgagatcagagaccagggatatcgtggcggaatgaccattctcagggcattcattcgttctctctcggttcctcaggagcaggagcctgccgttcgttcgaaactgaacccggacgacagatgcaggttgactggggcactatgcgtaatggtcgctcaccgcttcacgtgttcgttgctgttctcggatacagccgaatgttgtacatcgaattcactgacaatatgcgttatgacacgctggagacctgccatcgtaatgcgttccgcttctttggtggtgtgccgcgcgaagtgttgtatgacaatatgaaaactgtggttctgcaacgtgacgcatatcagaccggtcagcaccggttccatccttcgctgtggcagttcggcaaggagatgggcttctctccccgactgtgtcgccccttcagggcacagactaaaggtaaggtggaacggatggtgcagtacacccgtaacagtttttacatcccactaatgactcgcctgcgcccgatggggatcactgtcgatgttgaaacagccaaccgccacggtctgcgctggctgcacgatgtcgctaaccaacgaaagcatgaaacaatccaggcccgtccctgcgatcgctggctcgaagagcagcagtccatgctggcactgcctccggagaaaaaagagtatgacgtgcatcctggtgaaaatctggtgaacttcgacaaacaccccctgcatcatccactctccatctacgactcattctgcagaggagtggcgtgatgatggaactgcaacatcaacgactgatggcgctcgccgggcagttgcaactggaaagccttataagcgcagcgcctgcgctgtcacaacaggcagtagaccaggaatggagttatatggacttcctggagcatctgcttcatgaagaaaaactggcacgtcatcaacgtaaacaggcgatgtatacccgaatggcagccttcccggcggtgaaaacgttcgaagagtatgacttcacattcgccaccggagcaccgcagaagcaactccagtcgttacgctcactcagcttcatagaacgtaatgaaaatatcgtattactggggccatcaggtgtggggaaaacccatctggcaatagcgatgggctatgaagcagtccgtgcaggtatcaaagttcgcttcacaacagcagcagatctgttacttcagttatctacggcacaacgtcagggccgttataaaacgacgcttcagcgtggagtaatggccccccgcctgcttatcattgatgaaataggctatctgccgttcagtcaggaagaagcaaaactgttcttccaggtcatcgctaaacgttacgaaaagagcgcaatgatcctgacatccaatctgccgttcgggcagtgggatcaaacgttcgccggtgatgccgcactgacctcagcgatgctggaccgtatcttacaccactcacatgtcgttcaaatcaaaggagaaagctatcgactcagacagaaacgaaaggccggggttatagctgaagctaatcctgagtaaaacggtggatcaatattgggccgttggtggagatataagtggatcacttttcatccgtcgttgacacttggcaaacaggggcaaccatgtatgtcagatattataatctcacttccgaaagaagtcaacgggtacgttatctgttcaaccagaatccgacacattctggctatacgaaagagcatacttatgcaaatctatatgcttttccggcaacaagcaggaatctcagcgctgaggcaggaattagaggtaaaaacgccctaccgggccatgaatcacccggtcattggagtagtaaccaaagcagatttagccagcatggaacacatatctttggtgaaatgttggttacgggaagctggagcgcacaacgtgttagtaaccagtgcggttaataacaatggagttacagaacttttttccttgctgcatacagaagatgtctgtcgctaatttcgataggttctcagatgagaatgatgacggtgatacacagataagaatcaatgagcaatgagggttgccgggcaaccctcattgaataaaacaggaattacttcgcttcgccgtttttcatttcgcccatagctttcagctttttggagatatcgcggcgttctttggagagctcggcatttttgatgatgtaatcgtcaacacgatcttcatagtcacctttcatgctggcgatgatgccctggattgcttcaacgctcatccccggcttgatgtaatcgctcaggttgtccagcagcaggacgcgcttctggttgtcacggatctttttctcaacgtcctgaatttcacgttgcagtttgttcttacgacggaacagacgaacaaattccagtacgtcctggaatgaaggcttggtagtttccatttgtatacccctgataatgtgagagtcggattcgtttaagcaaccgctattcgttagggccaacattactcatagctgccgcagatgacaatgcttttatcccttttcactatcataccctttatccttgctgaatcgaagcagcagcaagatgattctgaagttcaggaattatttgcgcaaggcccggcaaatcagattcgatagcaactcaagctgatgtgccgtttccatgttcagccacacataaccatagattggtgtttccactaccttcaggtcatggtggttattgagcaactgacgcagctcttccacagcatcgttcaatttttccgtattggcaaaaaccggctgcggattaccttcgtacagcgcatgaacaaggctcagcagtatttgctgcatcatgtgctgggtatcacgaagtttttgcgcgttcaataacacgaaatggctggggcgcgtggcccagtacgcattgatttgcaactccagcatacaaaccagattgcggttaatggtctggataccttcatatatcgattttggaatacgggtttctttgctggcgggcgcaatcagcccacgcattttcacggcatcggtcaggagtttttgtagatggctttccagacgtgggcgttcgagtaagttcggtgagaatgcagattgatagacccgattatactcggtcagacttttcgccagttgaatgcgccagtggatgaacgcccgttgtggccagataccggtaaacaacattgccagtaaagagccgaggatcacatcgccgcttcgccataacgccgtatcaatttcacctgtcggggagccaacaacaattgccagcgtcaccccaatcaataaaccttgatacggtttcttgcccagcgccagccaaccgcaaaggaacatggccgccgcgcaccagactaacatcagcggtaacgagattaactccagttgcagagcgataagacctaaaatcgaacccaacaccgtaccgccaatacgctcaaaggcgcgagggacaacgttaccccagaacgagattggccccataatcaccaccatggtgaccagcggccaggtgctttccgggatagtaaacaggcggataatgagaaaagtgagcaggaatgccagcgcgacccgagtaccatgcacaatgcggtaatggcggtatacccggatttcaaacgggcttaatgacttatcggcacgcacgcagaaactccgtaatgaagattaaaagcgctcataacacatctgtcggccagaaggcgcgcctctgagttatccgacggacataccgggaacagtgtaatttcccggcaggagcgaaaaaattgaaaggcgcatcttactcttttcgctttcaaaaaaaagagtggtcatcgcgttaacacaccgccctgagatgaattagtgatgttttggctgcaccgcaacatacatttcgatatcccagtacccatcttccgcgccattgttcaaataaacctcgaagcagggctttggtaacatttcataagcactgtcctgcaagaggctattaaagaactgataccagggtttagcaaaatcatcaccgactacacgagccaccgcaaccgcatactgaccacctgaaatttctgtcagaatgacgccctcactgttttcgggaagcgtaaagttattcggtaccgtcacaacggtgtcgcagcgtaatttttcggcgggtgtttcatctggattgtcgtaatagacagcaacccactccttcggcacaatatttttgttatctacccacatcatcaactgctcaaagcctttctttaccgtctgttcccacgggccaacgagatggaaacctgcaacggtacgtttctcttcctgcttaatctcgtagttcatgacgcctccattaacactgtttttatatacagtatagttgcaatattaaaaccacaaggaatgagtgttgattatgcgagcagactcgcactcctgccagtctgctgcaaaagaaaggtcaggccttatggtggaaataatcactcaggcgggaaaacatgccgccttccccgacagattccagggtaaccagcggccagtgcgccacctgtttatcacggtcgtaaagttcaatttcccctacccgctgatgggcgctaattggcgcggtgagctctttaccatcaagggtatatttggctttgatatgtggaatttcggctttcggtagcaccatccagaactcttgttccgttcccaggtcgatattttctttatcgccataccagatgcgttccgttccgacctttttcccacggtgcaaaatttgcaccgtagtaaagttttgttgcccccaacgcagtaattttcttgcctcttcctcacgaccttttgcactgtcagcccccattaccactgcaatgagacgacgctgcccatctacagccgaagcaatgagattaaacccggcaccagaagtatgacccgttttcaggccgtcaacattcatggttttatcccacaacaacccgttacggttttgctgggtgataccgttccaggtgagacttttctcactgtacatatgataaaactcgggctcgccgtggatgatagcgcgagaaagcacagctaaatcataagccgagctatgctggccaggtgcatccagaccatgcactgtttcaaaatgcgtatccttgagatgcagcttctcggcatagttgttcatcatttcaacaaactgccgttgcccaccggcaatatagtcagccagagcaacacaagcgtcatttccggaatccacaattaaaccacggcttaaatcacgtaccgatacgcgatcgccctctttcaaaaacatcagtgaagaaccgacaaacaccggattatctttcgcccacgcatcgcgccccacggtgacaatatcgtctggcgtaatgcgatgactatcgatagcgcgatccacgacataacccgtcatcagctttgtcaggctggcgggattgcgctgttgatgctcattacccgcggtgaggatctgaccggtggtgtaatccatcagtacccaggacccggcatgaatctgtggaggctgaggtgaaaaaggaatgttttccgccgcaaaaccagacgataagttaaaaacgaacaaagaagcagcaataataagacggcgtttcaacagcaaaccctcaggagtttcaaatagctgttctttttacggaaatacttatgaactggctggaataaagtgcaagaaaatgtgactaccctcgcatttttatctgacatgatctgttgccactcgctgtcaaattatcgcgctaaagctgattagcacggtgatatttgatactctggcagacagcagaaataacggatttaacctaatgatgaatgacggtaagcaacaatctacctttttgtttcacgattacgaaacctttggcacgcaccccgcgttagatcgccctgcacagttcgcagccattcgcaccgatagcgaattcaatgtcatcggcgaacccgaagtcttttactgcaagcccgcggatgactatttgccccagcctggagcagtattaattaccggtattaccccgcaggaagcacgggcgaaaggagaaaacgaagccgcgtttgccgcccgtattcactcgctttttaccgtaccgaagacctgtattctgggctacaacaatgtgcgtttcgacgacgaagtcacacgcaacgttttttatcgtaatttctacgatccttacgcctggagctggcagcatgataactcgcgctgggatttactggatgttatgcgtgcctgttatgccctgcgcccggaaggaataaactggcctgaaaatgatgacggtctaccgagctttcgccttgagcatttaaccaaagcgaatggtattgaacatagcaacgcccacgatgcgatggctgatgtgtacgccactattgcgatggcgaaactggtaaaaacgcgtcagccacgtctgtttgattatctctttacccatcgtaataaacacaaactgatggcgttgattgatgttccgcagatgaaacccctggttcacgtttccggaatgtttggggcatggcgcggcaataccagctgggtggcaccgctggcgtggcatcctgaaaatcgcaataccgtaattatggtggatttggcaggagacatttcgccattactggaactggatagcgacacattgcgcgagcgtttatataccgcaaaaaccgatcttggcgataacgccgccgttccggttaagctggtgcacatcaataaatgtccggtgctggcccaggcgaatacgctacgcccggaagatgccgaccgactgggaattaatcgtcagcattgcctcgataacctgaaaattctgcgtgaaaatccgcaagtgcgcgaaaaagtggtggcgatattcgcggaagccgaaccgtttacgccttcagataacgtggatgcacagctttataacggctttttcagtgacgcagatcgtgcagcaatgaaaattgtgctggaaaccgagccgcgtaatttaccggcactggatatcacttttgtcgataaacggattgaaaagctgttgttcaattatcgggcacgcaacttcccggggacgctggattatgccgagcagcaacgctggctggagcaccgccgccaggtcttcacgcccgagtttttacaaggttatgcagatgaattgcagatgctggcacaacaatatgccgataacaaagagaaagtggcgctgttaaaagcgctttggcagtacgcggaagagatcgtctaatttgaagcctccgccgctggtacggcggaggtcaatgttgagtcaggctttttgaacggtgatactccacgctgcatcgccaatctgctgataatcggtgatggcatgtccttcttctgccgcccactgtgggattgcttcagttgcctgggtgcaatcaaactcaattaccaactcgtcgccgctggccatttctgccagtgctgcttttgcttctatgagtggaaacggacagacctgcgtcaccacatccagctttttaatcgccatctttacaccttacttaatttgccgcagcagttgccagtcgcgccttacgctgcggtcgaacatacacaagccaggacgcagtccagactccgagaatcataaatacaaggccaatccagccctgccaggtcatcattgcagtcataaccagtccattaccgatagagcaaccacctgcaatactggcaccgaagcccatcagtacaccacctaacccgctacgtaatgttgtttgtgcatcagctgcgcgaacgcggaactcacggctcgctttggctgcaataaatgaccccacgaagatccctaacaccaggaaaacgccccagttaatgtatttcacgtcacccgcgaccagaaattgcagaatattggccgttggggaagtgattcctaacccaaacatgcgtccggttgcttcactcaggggccaggctaaaagcgcaatcaaaccgatgagtacagcagtgacaaagggatgccagcgtttttcaatcagaatatgagcgatcccggttcggcgcggcggtaaggtcgcgactttgagttttggcttcttcaactctttcatcaccacccagagcgttatcaccagcaaaacggcaaccaacggccacacagacaaattaaaagtctcagcaatagagttatgttcagtactgtagtgctgcaaggtttgatttaaaccactggcatgtggagaacgcatcaccgcactcatcaccatataagtgaaaagcgcgatccaactgccgatcaatccctcacccgcgcgataccaggtcccggtggcacatccacccgccagaacaattcccagcccaaagatatacccacctataacagtaccaagccacgggaacgccccggcttcgtaagtcagtaggcccgcctgaattaacgcaaaaacccccacactttgtaccgaaattgcaatcagcaaggcgtaaaacatgcgattatttttcgcgagatacatatcgcgaaaaccacctgtcaggcaaaaacgcccacgctgcatgacaaatcccagcagagcaccacaaattagcccgcttaatatcattgaaaacataaattaattaaccagttgaatgttaatagggaaattattcatgactggtggaatgcagaccaataaccaaattctctaaattagaacaaatggttattaatgaggatgtcgataaaaaaaccggagccaaatattcattcgactccggtttattattacaaaagatgattacgctacgtcttcgtactgcggaaccgggttacggaaactcttggtgacgcaagccaggtaaatcagaccgatagccgcccagatcagacccagaaccattgagctttcttccaggttaacccacagcgcaccaacggtcagcgcaccacacatcggcaggaacagatactggaagtgatctttcagcgtcttattacgcttctcacggatccagaactgcgagatgaccgacaggttaacgaaggtgaacgccaccaacgcaccaaagttaatcagcgctgtagccattaccaggtcgaagttgattgccagcagggcaatcgcgccaaccaggatgatgttcatcgccggagtacgccatttcgggtgtacataaccgaagaagcttttcgggaatacgccgtcacgacccattacgtacatcagacgcgctacgcctgcatgcgccgccataccggacgccagtacggtaatggtggagaagatcagcgcgccaacctggaacgctttacccgcaacgtacagcatgatttcaggctgtgacgcatccggatctttaaagcgagagatatccgggaagtacagctgcaggaagtaagttgcaaagatgaagatcatgccgccaatcagcgcggtcaggaaaatcgcacgcgggatcacgcgctctgcatctttggtttcttccgacaggttgctgatgccgtcaaagccggtaaaggagaagcacaggattgtcgccccggtaatcatcgggataacatgcgcatcgccagaccagaacggacgagtgctcgccagcgtaccagcgccttcaccttcaaatacgccataaacaaccatgcccagaatcaccgcgatcagcactacctgcaacacgacgattacagtgttgaagttcgctacggatttcagactacgcaggttaaaggcggtcataaaggccaccagcgccaccacaaacatccacgatgggatggaaggcaccagagcttcaaaatagattttcgccagcagaatgttgatcatcggcgcgaacagatagtcgagcagagaagaccaacccaccataaagccgacagtcgggctaatggatttctgggcgtaagtgtatgcagagccagcagaaggatagcggcgaaccaacttcccgtagctcagagccgtaaacaggatcgcaatcaatgcgaacgcataggctgtcggcacatgaccatccgtgaggcctgaaacgataccaaaagtatcaaacagcgtcatcggctgcatataggcaagacccatcattacaaccggaactaacgtaagcgttttacgcaattccacgcgagaggtgtttggagtaacgttatgcgacatggtcattctcctttacggtgataaccgtcgcgtaagcaaaaaattgccccatttttttggattcctcagcgacaacaactgtcgatttttagtaaatatctatccggtacgaagcccggcctcttggtatgaatgattggtttgaagcaaaaaataaccgacgctgatgaaacgtcggtttttagtcattttttgacagcggcgcattgtgcctaaatgggggggaaatgacaagagaatgagaggcttgtcataataatttttctttaaatggctgattttccgtcatcagattttgcataaacaccggagatcgcactatttgctaaaatttcatcccgccaccagccgctggcaagccctgcggtctgttcattccagccaatccagacgggttcaaagagagtttgggcgaccactttcttctcgattaacgcgccactatcgagaaaccgttgcgccagataacggggtaaatagccgcagccgaggccgctaatttgcagctccagcttggttttaaaatcgaaaacggtaatggcttcttgttcgtcgagaagttgtgaggccgtagaagcgcctgcctgcgcagtatcccccaccacaatcgcccgatatcgcttaataatacgacggtttaacggctcttcttccagggctaacggatgatgaggcgcgaccgcaaagacttgttccagatcgcccaaccgtgaaaaaccaaactcactggaagatggtggctcatgcatcgcgccaacaataatatccgctcgcccctgagtcagggcatcccatgaaccaccgagtacgccattgataaacttcaggcgcgtcacgctatgatgttgataaaaagcttcaatcagtggcgcaagcagagaaaaaggaaacgtgtcgtccacgccaatcaccagctcgttttcccagccttcatgcagtttgatcgcctgcttttccagttcccgcacggtatgcagaacttcccgccctttctctaataacatttttccggtgcgggtgaatttagcgcggtgaccgctacgatcaagcaattgaatattaaggtcgctttccagcttgtgaacggtgtaactcagagcggacggcgtcttgtagagtttggccgacgccgccgcaaaactgccttctttttctaaggcatcgaggatcatcaacacatccagcagtggtttcatacacgcccccttgcagtgtatgcggcgtcctgctggcgtgatcgtttactccagcggcattaccagcggatcgggatactggtattcaaatcccagttcattacaaatccgactgccatcaataatcttacctttgccgctgtccagactatttctgaactgcggaggttccagccccagtaaacgggccatctgcggatagaaaacattacgcgcagggtgagctggcgcacatatattatagatgtgtccgcctttaggtgcctgtaacaacagagtgatagcgccaataacatcttctaaatggactaaattaacaccatgttcaccatcaggcgcggtttttccggcaaagaagcgtccgggatgacgccccggtccgaccaggcccgcaagacgcagaatatcgaccgaagtaccgggtaaattgtgcagccagtcttcgagttcttctaatactcgtccactgttggttaccggattacgcggggtagtttctttcaccatgccttgcgcatcgccatagacagatgttgagctggtaaaaataattcggggaatacgatgggccagcgcgctatccactaactcttgtaccgcttgtaaatagaactcatcgccggagccgctacgacgtgccggaagcgtaatgaccagtgcatcggcatccatcagggcatccagatcgtcagaatcgcaaactaactcaggctccatgcgaagcagatagctatcaatgccactcattcgggccgcttcgacaccatcttgtgtggttttactcccggtgacttgccagcctcgcgctgaaagtgacatcgccagcggcatgcctaaccaccctaacccgacaattgcgacctttttcatccgttatctcctgatacaccttagatctataaggctacgctagcgtatcaaaactgacaattcattctatgaatgaatctgttcaataatgataacgacatgctgcaatgagcagtgaatcgtcggtaaccgcgtataccagacggtgctcctctgtaatgcgtcgggaccagaaacctgacaaattatgtttcaggggttctggcttccccttaccttcaaatggcgttctgcgggtatctttgataagttcattgatctttttaacaattcgcttatctgtttcctgccagtacagataatcatcccatgattcctcagaccagattagtttcactcaataatgtccttttctgttcctttgcctgatttcaggctatcgattgagtccatcaatctccgggcgttagcgggggagcgcagtagataagccgtctcttccagcgagttgtattcttcgagtgacatcagaacacaagcctctccattctgacgagtaataaggatcggggcatgatcttcaacggctttcatcattgttgccgacaaattctgacgcgcttcgctgtagctaattgtacgcatgtcaatctcctcttttgtacagttcattgtacaatgatgggcgttaattaactatttattaattagtttgtagatcaaggtattgtcagtgagacgaaaatccaggcttcgctatttttggtgccgtcagcttagaggacagtcctcttagccccctcctttccccgctcattcattaaacaaatccatcgccataaaatatataaaaaagcccttgctttctaacgtgaaagtggtttaggttaaaagacatcagttgaataaacattcacagagacttttatgacacgcgttcaatttaaacaccaccatcatcaccatcatcctgactagtctttcaggcgatgtgtgctggaagacattcagatcttccagtggtgcatgaacgcatgagaaagcccccggaagatcaccttccgggggcttttttattgcgcggttgataacggttcagacaggtttaaagaggaataagaaaatgacagacaacactcgtttacgcatagctatgcagaaatccggccgtttaagtgatgactcacgcgaattgctggcgcgctgtggcattaaaatcaatcttcacacccagcgcctgatcgcgatggcagaaaacatgccgattgatattctgcgcgtgcgtgacgacgacattcccggtctggtaatggacggcgtggttgacctcgggattatcggcgaaaacgtgctggaagaagagctgcttaaccgccgcgcccagggtgaagatccacgctactttaccctgcgtcgtctggatttcggcggctgccgactttcactggcaacgccggttgatgaagcctgggatggcccgctctccttaaacggtaaacgtatcgccacctcttatcctcacctgctcaagcgttatctcgaccagaaaggtatctgttttaaatcctgcttactgaacggttctgttgaagtcgccccgcgtgccggactggcggatgcgatttgcgatctggtttccaccggtgccacgctggaagctaacggcctgcgcgaagtcgaagttatctatcgctcgaaagcctgcctgatacaacgcgatggcgaaatggaagaatccaaacagcaactgatcgacaaactgctgacccgtattcagggtgtgattcaggcgcgcgaatcaaaatacatcatgatgcacgcaccgaccgaacgtctggatgaagtcatcgccctgctgccaggtgccgaacgcccaaccattctgccgctggcgggtgaccaacagcgcgtagcgatgcacatggtcagcagtgaaaccctgttctgggaaacgatggaaaaactgaaagcgctgggtgccagttcaattctggtcctgccgattgagaagatgatggagtgatcgccatgagctttaacacaatcattgactggaatagctgtactgcggagcaacaacgccagctgttaatgcgcccggcgatctccgcttctgaaagcattacccgcactgttaacgatattctcgataacgtgaaagcacgcggtgatgacgcccttcgggaatacagcgcgaagtttgataaaaccacggttaacgcgctgaaggtgtctgctgaggagattgccgccgctagcgaacgcctgagcgacgagctaaaacaggcgatggcggtggcagtaaaaaatattgaaaccttccacactgcgcaaaaactgccgccggtagatgtagaaacgcagccaggcgtgcgttgccagcaggtcacgcgcccggtcgcttcagttgggttgtatattcctggtggctccgccccgctcttctcaacggtattaatgctggcgactccggcgcgtattgcgggctgtaaaaaagtggtgctgtgctcaccgccgccgattgccgatgagatcctttatgcggcgcagctgtgcggtgtgcaggacgtgtttaacgtcggcggcgcacaggccattgccgcgctggcgtttggtacggaatctgtgccgaaagtggacaaaatcttcgggccaggaaacgcctttgtcaccgaggcaaaacgtcaggtgagccagcgtctggacggtgcggcgatcgatatgcccgcaggcccgtcggaagtgttggtcattgccgacagcggcgcaacgccggatttcgtggcttctgatttgctttctcaggctgaacacggcccggactcacaggtgattttactgacgcccgctgctgatatggcgcgtcgcgttgccgaagctgtcgaacgccaactggcagaactgccgcgtgccgaaaccgcccgtcaggcactgagcgccagccgcctgatcgtgactaaagatttagcgcagtgcgtagagatctccaaccagtacggcccggagcacctgatcatccagacccgcaacgcccgcgatatggtcgatggcatcgccagcgccggttcggtatttcttggtgactggtcaccggaatcggcaggtgattacgcctccggcaccaaccacgttctgccgacttacggttacaccgccacctgttccagcctcggcctggcggatttccagaagcggatgaccgtgcaggaactgtcgaaagtaggtttctccgcgctggcttcgaccattgaaacactggccgccgccgagcgcctgaccgcccacaaaaatgccgttactttgcgtgttaacgcccttaaggagcaagcatgagcaccgtgactattaccgatttagcgcgtgaaaacgtccgcaacctgacgccgtatcagtcggcgcgtcgtctgggcggtaatggcgacgtctggctgaacgccaacgaatatcccacagccgtggagtttcagcttactcagcaaacgctcaaccgctacccggaatgtcagccgaaagcagtgattgaaaattacgcgcaatatgcaggcgtaaaaccggaacaggtgctggtcagccgtggcgcggacgaaggtattgaactgctgattcgcgctttttgcgaaccgggtaaagacgccattctctactgcccgccaacgtacggcatgtacagcgtcagcgccgaaacgattggcgtcgagtgccgcacagtgccgacgctggacaactggcaactggacttacagggcatttccgacaagctggacggcgtaaaagtggtctatgtttgcagccccaacaacccgaccgggcaactgatcaacccgcaggattttcgcaccctgctggagttaacccgcggtaaggcgattgtggttgccgatgaagcctatatcgagttttgcccgcaggcatcgctggctggctggctggcggaatatccgcacctggctattttgcgcacactgtcgaaagcttttgctctggcggggcttcgttgcggatttacgctggcaaacgaagaagtcatcaacctgctgatgaaagtgatcgccccctacccgctctcgacgccggttgccgacattgcggcccaggcgttaagcccgcagggaattatcgccatgcgtgagcgggtggcgcaaattattgcagaacgcgaatatctgattgccgcactgaaagagatcccctgcgtggagcaggttttcgactccgaaaccaactacattctggcgcgctttaaagcctccagtgcagtgtttaaatctttgtgggatcagggcattatcttacgtgatcagaataaacaaccctctttaagcggctgcctgcgaattaccgtcggaacccgtgaagaaagccagcgcgtcattgacgccttacgtgcggagcaagtttaatgagtcagaagtatctttttatcgatcgcgatggaaccctgattagcgaaccgccgagtgattttcaggtagatcgttttgacaaactcgcctttgaaccgggcgtgatcccggagctgctgaagctgcaaaaagcgggctacaagctggtgatgatcactaatcaggatggtcttggaacacaaagtttcccgcaggcggatttcgatggcccgcataacctgatgatgcagatattcacctcgcaaggcgtgcagtttgatgaagtgctgatttgcccacacctgcccgccgatgagtgcgactgccgtaaaccgaaagtaaaactggtggagcgttatctcgctgagcaagcgatggatcgcgccaacagttatgtgattggcgatcgcgcgaccgacattcaactggcggaaaacatgggcattaatggtttacgctacgaccgcgaaaccctgaactggccaatgattggcgagcaactcaccagacgtgaccgttacgctcacgtagtgcgtaataccaaagagacgcagattgacgttcaggtgtggctggatcgcgagggtggcagcaagattaacaccggcgttggcttctttgatcacatgctggatcagatcgccacccacggcggcttccgcatggaaatcaacgtcaaaggcgacctctatattgacgatcaccacaccgtcgaagataccggcctggctctgggcgaagcgttaaaaatggctcttggcgacaaacgcggtatttgccgctttggttttgtactgccgatggacgaatgccttgcccgctgtgcactggatatctctggtcgcccgcacctggaatataaggccgagtttacctaccagcgcgtgggcgatctcagcaccgaaatgatcgagcacttcttccgttcgctctcatacaccatgggcgtgacgctacacctgaaaaccaaaggtaaaaacgatcatcaccgtgtagagagtctgttcaaagcctttggtcgcaccctgcgccaggccatccgcgtggaaggcgacaccctgccctcgtcgaaaggagtgctgtaatgaacgtggtgatccttgatactggctgcgccaatctgaactcggtgaagtctgccattgcgcgtcacggttatgaacccaaagtcagccgtgacccggacgtcgtgttgctggccgataaactatttttacccggcgttggcactgcacaagcagcgatggatcaggtgcgtgagcgcgagctgtttgatctcatcaaagcctgtacccaaccggtgctgggcatctgcttagggatgcaactgctggggaggcgcagcgaagagagcaacggcgtcgacttgctgggcatcattgacgaagacgtgccgaaaatgaccgactttggtctgccgctgccgcatatgggctggaaccgcgtttacccgcaggcaggcaaccgcctgtttcaggggattgatgacggcgcgtacttttactttgttcacagttacgcaatgccggtcaatccgtggaccatcgcccagtgtaactacggcgaaccgttcaccgcggcggtacaaaaagataacttctacggcgtgcagttccacccggagcgttctggtgccgctggcgctaagttgctgaaaaatttcctggagatgtgatgattattccggcattagatttaatcgacggcaccgtggtgcgtctccatcagggcgattacggcaaacagcgcgattacggtaacgacccgctgtcgcgattgcaggattacgccgcgcagggtgccgaagtgttgcatctggtggatctgaccggggcaaaagatccggctaaacgtcaaatcccgctgattaaaaccctggtggcgggagttaacgttccggtgcaggttggcggcggcgtgcgtagcgaagatgacgtggcggcgttactggaagcgggcgttgcgcgtgtggtggtcggttccaccgcggtgaaatcaccagaaatggtgaaaggctggtttgaacgcttcggtgccgatgccttagtgctggcgctggatgtccgtattgacgagcaaggcaacaagcaggtggcggtcagcggctggcaagagaattcgggcgtgtcgctggaacaactggtggaaacctatctgcccgtcggcctgaaacatgtgctgtgtaccgatatctcgcgcgacggcacgctggcaggttctaacgtctctttatatgaagaagtgtgcgccagatatccgcaggtggcatttcagtcatccgggggcattggcgacattaacgatgttgctgccctgcgtggtactggcgtgcgcggcgtaatagttggtcgggcattactggaaggtaaattcaccgtgaaggaggccatcgcatgctggcaaaacgcataattccgtgtctcgacgttcgtgatggtcaggtggtgaaaggcgtacagtttcgcaaccatgaaatcattggcgatatcgtgccgctggcaaaacgctacgctgaagaaggtgcagacgaactggtgttctacgatatcaccgcttccagcgatggccgtgtggtagataaaagctgggtatctcgcgtggcggaagtgatcgacattccgttctgtgtggcgggtgggattaaatcgctggatgacgccgccaaaattctttcctttggcgcggataaaatctccattaactcccctgcactggcggacccgacgttaattactcgcctggcggatcgctttggcgtgcagtgtattgtggtcggtattgatacctggtacgacggcgaaaccggtaaatatcatgtgaatcaatataccggcgacgaaagccgcacccgcgtcactcagtgggaaacgctcgactgggtacaggaagtgcaaaaacgcggtgccggagaaatcgtcctcaacatgatgaatcaggacggcgtgcgtaacggttacgacctcgaacaactgaaaaaagtgcgtgaagtttgccacgtcccgctaattgcctccggtggcgcgggcaccatggaacacttcctcgaagccttccgcgatgccgacgttgacggtgcgctggcagcttccgtattccacaaacaaataatcaatattggtgaattaaaagcgtacctggcaacacagggcgtggagatcaggatatgttaacagaacaacaacgccgcgaactggactgggaaaaaaccgacggacttatgccggtgattgtgcaacacgcggtatccggcgaagtgttaatgctgggctatatgaacccggaagccttagacaaaaccatcgaaagcggcaaagtcactttcttctcgcgcactaaacagcgactgtggaccaaaggcgaaacgtcgggcaatttcctcaacgtagtaaatattgcgccggactgcgacaacgacacgctactggtactggcgaatcctatcggaccaacctgccataaaggcaccagcagctgcttcggcgaaactgctcaccagtggctgtttctgtatcaactggaacaactgctcgccgaacgcaaatcagccgacccggaaacctcctacaccgccaaactgtatgccagcggcaccaaacgcattgcgcagaaagtgggtgaagaaggggtggaaaccgcactggcagcgacagtacatgaccgctttgaactgaccaacgaggcatctgatttgatgtatcacctgctggtgttgttgcaggatcaggatctggatttaacgacagtaattgagaacctgcgtaaacggcatcagtgagttgcggggtaaagctgcaaagattacttcgcgttgtaattacgcagagcattacgccccaacacaatccccgcgccaaccatgccgcccagcagcaccgccagaatcaaggtgattgcctttttcgggctatcgcgacgaataggtaacgtcggtttcattacataacggtaagcatgaatatcaagatcatcaacttttaagctttcgatatccagcaggttttgacgagtctgatagtagtttggtgagaacaccaacggacgggtcgcctcatgcttaatcatcgactccagcgcttcgctccccaaaaggaacaacgtatcttgtgtcacatcttcagtctgctgaacctgtggctttgtcacctgcgcctgattcgcatactgcaacgcttcctgaatctgacggatacgcagatctttctgctcctgcgcgactacttcctgggttttcagcgaatcctgcaagtttttcatacgcagcgcgatgttgtctttcaggtctttttccagttcttcgtttacctggtcgtcaacttgctggatatattgcgccagctatttctgcgcaccttcagctgtttcaccaacataagacaccgctaaaggtaaggactgatttttaacagtaggctcaatggtcagtttttcaggttcttcctgattatccaacgtttccgctaatgctgagaatgcagtgctgtaacgtccgataagtgaagtctgaatgtcggagactttcggtacagccggaccgtaaatcacattcatcgcgttggtataaccagcgatttgccccacatcaggttgagtaacgatagctgtggaagtccacttttctttggcaacggccagataccctatagccagggcaatagcgacaatgacagagatgataattgtcatcttgccgcgccacaactgcaccagtaaatcaatcaaatcaatctgttccgggtcatggttttgcccagaaacattattattttctactctcatcattaccctaacggacgaaataattttaagtcgccatagtttagcgataatcgccatgaatgctataggataaatgataaaaagaatgaattactacaaagggaacataagagaatcagggcgaaaatcgccctgataacaggatgttagtcgctgccaaaaagatcgcgggtgtagaccttatctgccacatccttaagctcttctgccatacggttggaaataatgacgtcggcttgtatagtcagcttagaacagctttgattgtaaaatgagcacgttaccagaaaaaacagccaggtttagaactgataccgattatctttttttcttgtctaacggtatgatttaactttcagttatgccagatgaaaattggctatattctagcctgagcgaggattataaatgaaatttctggttacgggagctgctggctttatcggtttctatgtaagtaaacggcttcttgcagctggtcatcaggttgtagggattgacaacttaaatgattattacgatgtcaacctcaaacaagcacgacttgatttactcaagcacgacaatttcagtttttataaaattgacctggccgatcgcgagaaaatggcggcactgtttgcagacgagcggttcgatcgcgtaataaacctcgctgcgcaagcaggtgtacgttactcccttgaaaatcccaatgcatatgcagatgcaaacctgattggattcctgaacatactggaaggatgccgctataataatgttcagcatctactttacgcttcctccagttctgtttatggcatgaaccgcaagatgcctttctctacagatgactctgtagatcatcctgtttcgctttatgcagcaactaaaaaagcgaatgaactcatggcccatacgtattctcatttgtatggcttaccgaccacagggctgcgtttctttacggtttatggtccatggggacgtccggatatggcattatttaaattcactaaagccatgctggaaggtaaaagcattgatgtttacaacttcggcaaaatgaagcgtgactttacttatattgatgatattgccgaagctattattcggttacaggatgttattccagaaaaagatccacagtgggctgtagaaacaggttcgccagcaacaagttcagcaccatatcgtgtctataacattggtaatagttcgcctgtggagttgatggactatatcaatgccttagaagaggctctgggtattgaagccaacaagaatatgatgcctctccaacccggtgatgtactggaaaccagtgctgatacaaaagcactgtatgacgtaataggattcaaacctgaaacgtcagttaaagagggagtaaagaactttgtagaatggtatcgtaacttctataaagtttgattttacaaaaccataagaaaaggccctaatatattagggccttttcttagaataaaacaaaataattaatcattgccaaacaagtcgcgcgtataaaccttatctgctacatcagccagatcggcagacatacggttagaaataataacatcagcttcttgtttgaacgcatccagatcacgtaccacgcgcgaccggaaaaaatcgtcctctttcatcgctggctcataaacgattacaggcacgcctttcgccttgattcgcttcataataccctgaatcgaggaagcacggaaattgtctgaaccactcttcataatcaaacgatagacgccaacaactttcggtttacgtgcaaggatagaatcggcaataaaatctttgcgcgtgcggttggcgtcaacaattgccgagatcaggttattcggcacagactggtaatttgccagtaactgcttagtatctttcggcagacaataaccaccataaccgaatgacgggttgttgtagtgattaccgatacgcgggtcaaggcatacgccctcaataatctggcgtgaattaagccccaggctttcagcataactatcaagttcattgaaatacgctacacgcatagccagataagtgttggcaaaaagtttaatcgcctcagcttcggttgagtcagtaaacaatgttggtatgtcttgcttaatggcgccttcctgtaataacgcagcaaaacgttcagcgcgttcagactgctcgccaatcacaatgcgtgatgggtgtaagttatcataaagtgctttaccttcacgcaaaaactcaggcgaaaagatcacattttcaataccaaaacgttctttaatggactctgtaaaaccaacagggatagttgattttataatcattaccgcgttgggattaatttctgtcacatcgcgaatgaccgcttccacgcttgaggtattaaaataattcgttttcggatcataatcggtaggtgtggcaataataacgtaatcggcatttttatacgcgtcatacttatctgtcgtagcgcggaaattgagatctttagtcgccagatactcttcaatctccttatcaacaatcggtgactgcttcttgttaagcatgtccactttggcctgaacgatatccagtgcaaccacttcgtgattttgcgcaatcagaataccatttgaaagaccaacataacctgttcctgaaattgttattttcattagctctgacttcttccggttaaacatttagagtggtcattaatccaccaccacatcttcatctactgcgggatttttaacgccgatgcggatgaactgtcaaggcagcgatcctgctgtgcgactctgtattatatcgcttttttaaccataaattataaaaaaaggccataacctgccgctttgtataataaaaaagcccggagggtttctccgggccttgcattgattaattgatttaaatcagattaatccagccattcggtatggaacacaccttctttatcaatgcgcttataagtatgcgcaccgaaatagtcacgctgtgcctggatcaggttcgcaggcagaacagcggcgcggtagctgtcgtaataggcaaccgcagcagcgaaggtcggaacagggataccgttctgtactgcataagcaacgacatcacgcagcgcctgctggtagtcatcggcaatttgcttgaagtacggagccagcagcagattagcgatttgcggattttcggcgtatgcatcggtgattttctgcaggaactgcgcacggatgatgcagccagcacggaaaatcttcgcgatttcgccgtagttcagatcccagttgtactcttcagacgcagcacgcagctgagagaagccttgggcgtaagaaacgattttgcccagatacagcgcacgacgaactttttcgatgaactcagccttgtcgccagctggctgcgcttgcggaccagagagaactttagatgcggcaacgcgctgatctttcagagaagagatataacgtgcaaacacagactcggtaataagcgacagtggttcaccgagatccagcgcactctggctggtccatttacccgtacctttgtttgctgcttcatccagaatcacatcaaccaggtagttaccgtcttcatcttttttggtgaagatatctttggtgatgtcgatcaggtagctgctcagttcaccgttattccattcggtaaaggtctgcgccagttcttcgttggtgaggttcaggccacctttaagcagagaataggcttcagcaatcagttgcatatcaccgtattcgataccgttgtgaaccatcttcacatagtgacctgcgccatcggcaccaatataggtaacgcatggctcaccgtcttcagccactgcggcgattttggtcaggatcggcgcaaccagttcataggcttctttctgcccaccaggcataatggaaggacctttcagcgcgccttcttctccaccggagacaccggtaccaatgaagttaaagccttcagcagaaagctcacggttacgacgaatggtgtcctggaagaaggtgttaccaccatcaatgatgatgtcgcctttatcgagatatggtttgagggaatcaatagcagcatccgtgcctgcacctgctttcaccattaacaggatgcgacgaggcgtttccagagattcaacaaactctttcaccgtatagtaaggaaccagtttcttgcctggattttcggcaatcacttcttccgtcttttcacgggaacggttgaaaatagagacggtataaccacggctttcgatattgagcgcaaggttgcgccccatcactgccataccgacgacgccgatctgttgctttgacattgtttactcctgtcaggataccgctgggtggtatgcgggttatgcttaattatagaatatgcctaataaaaacaaatccataacacttaatcagaaaattattattatcgattcctaacgattgaatacatcagctcctttaatttagatggcattatacgaaaaaatgttctcaacatagcattacttattaattcattttttcgaataaaaccaattttatattgataatacaatactttatactcgtacaataaatatgacaatccacgtcgagccataagattacgaccagttcgcatttttaataaaatatctggaagatttgcaaatcttgcattatgtacaattaataggctccataatgcaaaatcttgagattttctgaatggaggataaccaccaacagctaatactgtattctttctaaaaattacagaaggatggctaactgcgcttcgtttcctcgcgaatttaactatttctctatgttcgagaggcactttgcgtgttgaaataaactcctcagtaacagtttcaatttcatcaataaaactgccacatacatctatttctgaattattaatcataaaagaaatttgtttctcaaaccgatgaggcaaagaaatatcatcagcatccattcttgccactaactcattcctacaagcctttaatccttcatttaaggcattagccaatccaacatttctaggtaaaggtacaaatgttactattttattgccaacatcatcaatgaatgaatttataatatcgatgtgtgtttgatggagttctccatctgcaacaattactatttgatctggcttaagtgtttgatcgtgaaaaatagagcgtagagccacctcaaaaaattgcggtagatcatttttataaatgctaattaaaactgagaatttttctaatctatgattcatttcattttaccacttcgacccattaaaccgtcattaatgccttttaaaaaaaaatataaccttttattaccatttggaaggaaaataggatataaaaaaacctttccaattaatttaaccagactagaaattttccagtagatgggtacatattttttatttaataaaagaaagatatttcgagtagcataataatgacgaaatgggcttggcaaaccgacagaaagaatatttaagatcttaaatcgcccatctccaagtctatgtgcaagtaacgcatttttattcctaattactttaaacccagcagctcttaatctccaacaatattcatggtctaccgcatcgataaaaagctcatctttcattcctccaacaatcaaccaactattttttggtattagactgccagaacttaatgtactatctacctcataataaacttctgtaagtggtttccctttttttacccttgctttatttaattcaccagttactttatcaaaatcttgtgaaccgactaaaccaacattgacattttgtttaagcaattttttgtaacaagtaagtaactgctctaccatcttaggatcaggaatactatcctgatccatttgcaatataaaatcagcaccattttcaaaagcccatttcattcctatactttgggcttctgctatgcctaaattatcattgaaattgaatatttttacatcgcctgaagaattttcagcatatttataaccatttgtagagttattgcaaacgacaactttagtaacttgtctcaacaataattcaaccgcattttttaaatcattatgttctgggttgtaagcaaccaaaacggcatatacagtgtccatcttcaccttaaaaccttcatttagctttcatcttttttagaacattacttaatgtcactaatacaattattacagcaacatggttagagtctaaaatataaggattagtaattgcataagaaacatatagaaaatatagcacacacaactcactgtattttatgattttaatcgtgagaagcagattaattaataaaaacaaagtaaataaaataacgccaagttgatttaaaaaataaactgactgcaattcataatatatatatgcactataatcacggataggagtttgaattttgatgacattacccaaaccagaacctataacaaaattagatacagactctgtaagatcattaattaatacagtaaactgatcccatctaactcctaaagaagaatcagctccatttgatttcatgattatcaactcaattgaatatgtaataaaaaaagggagaatcacagtaagaaaaaccccaaaaataattttccttaatttagcgtatcgtgagttagatttagaacatagtataatatacataaaaaacaagcatatcgaaacaaaatatgcaaaattaccagccactatagtacctatagccagaataacggttattgtatttttgaatcgataatagaaataatcttttatgactatatgcaacataaaggcaaatggaatgagagcatttcctttaatttgaactctatagaaaccacttccatatgtataaacatcaccataatcattctccaaaaaataatgtcttagtgctgaataatcaccaataccatatgtttttgtcatataaatactaatgatggatataataaccgcctgtaataccattaaatataaaaatattttaacaatcgagatggttccataagagcaaaaataagcacataatataaataatatgataatataaaacctaattattatcgctatatcgttacccttgatataggaataaataaaatttataaaaagagctaatagaaatattaaaataacaggatagtgatatattccgtttgcaattttctttgtaaatgacatgatacaaagacataaaaacccccccataatccaactatattgaataaatggaaagctacgtgtaaggaaaaatataaacccaaaaaacaaaagaacacttaaacttttgtcttttgagttataaaaatcagaagtcatgtttgcactctaattagatgggcttgaggaagtaatccctaaaatcaattcgctattaatatttcttatcaattaataataatatcaaaaaatctaacgatgttcttacagaccatgctattgcggctccaacaattccccaatgataaataaaaatatataatatgcataaatatgggataacttcgagcaaatgaataatagctgtaatttttgatcttccactagcctgaactgaaacaaatgggatttgtgcaatgcaattaaaaaagaaacctattgcaagaatttttaatactatacctggcgtcccatgatatgtaggtcccatccaagcggacattataaaatctgataaaataattatcaaaattacaattggaagtataccaataaccattataaaatatgataatattttagtttgctttaccgattgcaattctgaacttaatcttggaaaaatagctctggacaacgcacttggtaatatcgttaagcgttgtataccttcagacggagcagtataaaaagaaactttatcagcccccacaatgtgtgaaagaataaaacgatccatatatgtcataatagggctaataatattgctaactgttatccagcttccaaagccgattaatcttttaactgttacaatttttacagacagcccagatgatattattagttttcgactaaatataaaggtcactataagtgataagactcttgccataactaaaccatatatggcacttagtaatcctccatgaaaaaaacagaaaatcactggtaatccagccacaaaagaattgttaattgattttattaaatttacttttctgaacttttccatcccctcaaaaatccccaaccagacttggtttaacaagtataagggtatggtagctgaaataatatatattgctttgacagattctacaacatgattcgcgttaatgtttaataatttaacaattacattgctactcaaaaataatacactaccgccaatcaagcccaatatagttagaattaccgttgaagttgaaatgatcgatcttaattctttatgaacatttttatatattgatacttctcttataacagctctggtcaatccagcatcaaaaatacttgcatatccaactaaggcaatagctaacgtaaaaaggccaaattgctcggcccctagaattctagacagtatacctaacgcaggaattgctattaatgatggtataatatacccacttatattccataaagtattctttacaatactcacaaaaataattccttcatgttatgcaattctttagcccttgcatctttaatcgataaaatataattattatgttctatcgtcggccattttatgctcagaataggatcattccatacaatccctctatcactatcaggatgataatagttcgtcgttttatataaaaattccgcagtctcgctcagcaccaaaaaaccatgtgcaaatccctcagggatccacaattgccgcttattctcagcagataaattcaccccaacccatttaccaaaggtaggcgacgatttacgaatatcaacagctacatcaaaaacctcaccaacaacgcaacgtaccaatttcccttgcgcataaggttctaactgataatgcagcccgcgtaaaacacctttactagacttcgaatggttatcctgaacaaattcaaccttacgtcctacagcttcttcgaaaactttctgattaaagctttccataaagaaaccacgctcatcaccaaaaactttcggctcgaaaattaacacatcaggaatttctgttttaattacgttcattttattaataacctttaatcattttcagcagatactgtccataagcattttttttcagcggctccgctaatgctttcacctgttcagcatcaataaaccctttacggtaagcaatttcttctgggcaggaaacctttagtccctggcgctcttcaatggtggcaatgaagttgcttgcttcaataagactctgatgtgtccccgtatccagccatgcataaccacgccccatcatggcaacggataaacgcccctgttccatataaatacggttaatatcggtaatttccagttcaccacgggcagaaggcttaaggtttttcgccatttcgacaacgtcgttatcatagaaataaagcccggttaccgcataattactttttggttgtagcggtttttcttccaggctgatcgccgtaccgtttttatcaaactcaacgacaccgtagcgttcaggatcattaacgtgataggcaaataccgttgcaccactttctttgttaacagcgacatccattaacttcggcagatcatgaccgtagaagatattatcaccaagaaccaaagcacaatcatcaccaccgataaactcttcaccgataataaacgcctgcgcaagcccatctggagtcggttgcactttgtactgaagatttagcccccactggctaccgtcacccagcagttgttgaaaacgaggagtatcctgtggcgtactaataatcagaatatcgcgaatacccgccaacatcagtgtagagagcgggtaatagatcatcggcttatcataaataggtaatagctgtttactgacagccatagtcacaggataaagacgtgtaccagaaccacccgctaaaataatacctttacgcgttttcatttcatcattccttttaattcatcttgctccaccatcacgaacaagatgcaaaaactatttaattgctgtagtcgtaattaattcgttgagcattcgtttcacaccaacctgccagtcaggcaagacaagcgcaaagttctgctgaaatttttctgtattaaggcgagagttatgtggacgacgagctggtgtaggataggctgttgttggtactgcgttgagcttgttgagtgcaaggggaatacctgctttgcgcgcctcttcaaaaaccagcgcagcataatcgtgccaggttgtggtaccactggctaccagatggtacaaacctgcgacttccggtttattcagtgccacacgaatagcatgtgccgtacaatcagccagcagctcagcacctgttggcgcaccaaattgatcatttatcacagccagttcttcgcgctcttttgccagacgcaacatcgttttggcgaagttatttcctttacctgcgtatacccagctggtacggaaaataagatgcttcgcgcaatgttcctgtaacgctttttctccggctaacttggtttcaccgtaaacatttagcggtgcggttgcatccgtctccagccatggcgtgtcgccatttccagggaatacgtagtcagttgagtaatgaattacccaagccccaacttcattagccgcttttgcaattgattcaacactagtcgcattgagtaattgtgcaaattcgggttctgactcagccttatctactgcggtgtgagccgcagcattaacaataacatcaggtcgaattcttttgactgtttcagctacaccttcaggattactaaaatcaccacaataatcagtggagtgaacatcaagagcaatcaaattacctaaaggtgccaaagcacgctgtagttcccaacctacctgccctgttttgccgaaaaggaggatattcattactggcggccctcatagttctgttcaatccacgattgataggcaccacttttcacattatcaacccattttgtattggacaggtaccattccactgtcttccgaatcccgctctcaaacgtttcctgcggtttccagcccaattcgcggctaatcttctctgcatcaatcgcataacggcgatcgtgtcccgggcgatcggcaacataagtaatttgctcgcggtaagatttctctttcggtacaatctcatccagcaaatcacaaatagtgagcactacatcgatgtttttcttttcgttgtgtccaccaatgttataagtttcacccgctttaccttcggttacgacggtatataacgcacgcgcatgatcttcaacatacagccagtcacgaatttgatcccctttgccataaataggtaatgccttaccttccagagcattgagaataaccaatggaatcaatttttccgggaaatgataaggaccataattgttagagcaattagtcacaatggttggtaaaccataggtacgtttccacgcgcggactaaatgatcgctggatgcttttgaagcggaataagggctgcttggcgcgtaagctgttgtctctgtaaataagggtaattcttctgtattatttacctcgtcaggatgaggcaaatcaccatagacttcgtcagtagaaatatgatgaaaacggaagctagttttcttgtcgctatcaagagcagaccaataattgcgagcggcttccaaaaggacatatgtaccaacaatattggtttcaataaatgccgcaggacctgtaattgaacggtcaacatggctttcagcagccaggtgcatcactgcatctggctgatgctgagcaaaaatccgtgccattgcagctgcatcgcaaatatccgcatgttcaaaaacatagcgttcagaatcagaaacatcagcaagtgattccaggtttccggcgtacgttaatttatcgacattaacaacactatcctgcgtattatttataatgtgacgaactacagcagaaccaataaatcctgcgccaccagtaacaagtattttcacctaatttattccatattgcttcagagcatgctgtgaaataagcggctctcagtttgattaatagaagtattaatgcacgctaccgcccctggctttacagctaccagagcactgcatgcatgcctacgatgtgacgagcgttacccactcgcgctaaacccgaaaaattcaaaagctaattgtcttaccaatccgctctggaaacaaggaaaatcctggaaaactttgactaaaatcctattgctaactcgttgttattctgattgtttatataaaacaacggcaggaatattcgcaacaaattactttcgccacgaatcctcactgccgttataattttcttattaaccgttacatccggtcagattttcattattcgcttaacagcttctcaatccctttacggaacttcgccccttctttcaggttgcgtaatccatacttcacgaatgcctgcatatagcccatttttttaccacagtcgtagctgtcaccagtcatcagcatggcatcaacggactgttttttcgccagttcggcaatagcatcagtcagctgaatacgcccccatgcaccaggttgagtgcgttcaagttccggccaaatatcggcagaaagcacataacgacctacggccatgatgtctgagtccagcgtttgcggctgatccggtttttcgataaattcaacaatgcggctgactttgccttcacggtccagcggttctttggtctggatgacggagtattcagagaggtcacccggcatacgttttgccagcacctggctacggcccgtttcattgaagcgcgcaatcatggcagcaaggttgtagcgtagcgggtcggcgctggcgtcgtcgatcacaacgtctggcagcaccacgacaaatggattgtcaccaatggcaggtcgcgcacataaaatggagtggcctaaacctaaaggttcaccctgacgcacgttcataatggtcacgcccggcggacagatagattgtacttccgccagtagttgacgcttcacgcgctgttcaaggagagattctaattcataagaggtgtcgaagtggttttcgaccgcgttcttggacgcatgagttaccaggaggatttctttgatccctgcagccacaatctcgtcaacaatgtactgaatcattggcttgtcgacgatcggtagcatctctttgggaatcgccttagtggcaggcaacatatgcatcccaagacctgctaccggtataactgcttttaaattcgtcattcttttcctacctctaagtggctgatagtgcgtaaattattgccataggttagccaaacgttatggctatataccaaagcttagttccgcataactttgcttaaaccttaggataacactacacaccatcagcatctgggttactcggattactcggaattccgcatactgataatttaatcagtacctctttccgaataatcgtagtccaacctggtccttttttctctgactcgtctgcattactcagaaacaaacgttatgtcgtcttttttggcatgaacgaattcatactgcagagttcgatccagaccttgcgacagcgtatacggtgccacaaaacctgaagaatgcactttcgttgcgtcaaactgtgttgttgcgcagaattttttcacgcgcactgagctgacagcgtattttttgcccgtaattttgctcaggatatcaaaacaatagccccccagcattcctagtgggtaaggcaagtgcatagaagggatctttttgttcaggctttgttcaacttcagcaaccaactggttcatgttcaggtctggcttatcaacgtagttataaacctcataacctgcggcaacattcttcagtttgtacttgataaactcaacaatgtttccaacataagccatggacttatagttagtccctgcgcccaccatcataaacttgccgccagcgatctgtttcagcaagttatagacgttaccgcggttccgttcaccgaagataacggtaggacggatgatggttaatgaacgttctgttggtgctttgttataccattcacgcagcacttcctctgcctgccacttacttttgccgtagtggttgaaagggtcgtgtggatggttttcgtcagggttgtgtttgttcaaaccataaacagcaacggaactggtaaagatgatatttttaacgccatttttttccatggccgccagcacattgcgggtaccctgaacgttgacatcataatagagagaagtagggctgacgtcatcgcggtgttccgctgccagtagcacaacagtgtcaaaaccggctaacgcctggtcgagtgcctgttgatcacgaacatcaccaatctgtgtgatttctggataaaagtggctctgctgtttgtccaggttcttgatattaaagtcagcaattgccgtttcaagtagtcgggttcctacgaatccggaagctcctatgagcaaaacgttatcgttcataaatcactttagtctggttgttacgtaagaaacacaagataaagatgagtaccttccctgagtagtcaatgctgcccagccccagctttaacagttagtgtgaggattataatcttttagaacattatatccagtaagtttatgaatggtcgcaaatctactctctccgttccggcaatctaaagttaatcttttccacattaacaatatggtgattaatcctgtcgatgtcgacggagctttgccctctttcattcatcgcatgaacatttgcaagtgacagcagtgtttcttttttcgccataaagacaccgcgtacgtctttgcgcatgtcgaagttcatgctcaatgctggtccaactgaggattcctgcatcactttgatattacgcataaaaagatgttgcggtttattgtgaagctccagcgaggcacgcttcatctcaatgttagtcagcgccacaaaggagacagcattcccggcggagatttggatgccgcgcaatttataagcaagatgggtgttatccagttgaatattattcactcggaaattttgcggtatcgagagatatttgcctttaattaccccatagccgattaacatcccggcgctattaatcatttcaatattatcaatcacgaaattgtcacaaccgtaaatagcaactgtcgcgttatcaatgcctgctttcttactgaaatccggcgtgatattgcgggctttgatattacgaataacaaaatgtttaccattttcaacatggatcaactgccgacaatccgatcccgtgatattcgctacgacaaagtttttcactgcctgatcttctgggtaattattatcgtaagtgcttcccgcaaggcctatgccgatgccccagttgattttgccgttggtacagttgatgcgctcgatgatgtggtcggatatcaaaatatcgcggtcgttaatcgccacgttccattcaatggcatcgccctgtaagtcgctgaacttacaattggtgatgttggcaccgattatctggttatgaaatccctggcgtaagatggcgtaattagcgtggctaacggtcaggttatcgatggtcaggttacgcatgacccgtttgtttttgccgccgatatagatctgcgtcaccgggccaaagccgctcatcgtcagccctttgatggtgcagtcagaaccacgcacatccagggtgatgttatgcatactgccgcccttctcccctgtcacctggctgccgtcctgtaagacaaatcgccctctgccgttgcctcgcaggcttccgaggatgtgtaacgttttgccaggaggaatgaagatgccggtgttgatattgtcacaaacgaatccggcaggcacgacgaccgtttgcccttcgctgaaggcttgtttaaatgaggcgatccagtcgtgtgggttgtagtcgttaatgttaacgctctgttggtcgggaagtgcgcgagcgaaaggggtatggaggaaggcaagcgccgagcttgccgtcaggaacgtgcgtcgggagagttttttaaatggcatgcgttctcctctataaagcctgcagcaagctggcgagttctcgattgatcacctgctggttaaaatcgtgttcgactttttcgcgcgcacgtttgacaaccggagccagttcgtcagtgtccagttggctaaatgccgccagacgttgtgccagtgcgcgagcatcgttctcaggcaccagccagccggatttatcggcctccaccagttccggtattccgctatgcagagtagaaactactggaatgccgaccgccatcgcttccattagcgccactggaatgccttccatatcaccatccgcgcccgttaccgatggcaacaggaagacatccgcgtcgtcgagcatcgctttcacttcatggctcggtttaaagcccggcatctctaccacatcttccagttgatattgttcgatgagggtgcgcaggcgtcgttcccacgggccaatgccgagaatgcgatagcgaaatgccacgccctgctctttcaactgacggcaggcttcaatcgccacatgcagaccttttttctcggttaagcgtgcgacggaaatgatttccagcggcgttgcgggcgctttcaccggacgcgggctaaaacgcgtcatgtccacgcccatgcgcgatacggcgattttttccctcggacagcccattttttgcagccttccggcccacagatcgcttatcggtaacatcaggtcgccacgtcgaaacagttgttgatattcgggagtgtagtggttgagcacttcccgactggagatatcaataccgtggaagatggtggcaattttgccgcgaatgacacccagttcgcgtagttttgctgcggttacccccgcaggaccaaaatgagcgataaagacatcggcatgaaatggtgttgcaacctgaccgcaaatggcagacaaaatcaggttccgcgactctgcgccatagcgcttgaggttgagcgcctgccaggtatttttacgatgaatgccgcgtaaggtctggctggcgcggtggcgcagcttcgccactttgcccgtaggttcgtcctgtaaccagcgggttctggcggcaaggttgtatttcgtccatgccgcgtgggtgttctctgtatcgcctttttgcaacgcgacaatctccacctcaaagcccatatcaataaacgcagtgatttggttaagaacgaaggtttctgacgacagcggaaatttcagtaaaaagaagccgaccttcatttcacctccccgatgcgttcaagcacagattgcaccatctgcattcccgtctgacgttcgcgactaacggcttcgttaagtcgcgtgttcagcgccggaagctggcctaaggtatccgcaaccatcgcttgcaggctaccgtctaataaatgacggatatcaattgccatctccggtagtcccagctgctgcatgatcccggcggatttatgttcatagttgatggcaatcgccggggtggcaaagttcattgagataatggcggagtgcaggcgcgtaccgacggtgagttcacaggcaccgagaattttgcccatttccagatcgttaagttcatccatcactacgtggtaacgggcaggatcgctgatgtgctggcgtagattgagcgccaccatgcgatcgtctttgttatagctgtcgatgcccgtacaggtggaaagcgcaatcacctgatacccttcgtcgagaatgcgattgaccaccccggcaaaggctttttcatacgcttgttgagtggtgccgagacgtttgtcgaacggtgccagttcgcgcagggtaattgctaccgttttctgttgtgcggcaacgtccagccagtgttggacggcatagctggcggtgaagtcttctgtgtggtgatcgaccagccacgcggtatcgacgccatgttccacttttgcggtagtgatattgctgcgtttcatcaaatcaaggctgaccgattcgcgcaggatcagcgcgtcgcagtgaccgaaaacgtagttcgccagttggttaaattgctcatcctggaagggaccgacgctgtgaccaatcataaacagcggctttttcgccataaacgtgcaaagcgcatgttcaaactgcggcacgccgtagagatcgacaaaaaacgatccgccgacctgaataatggcgtcgtaacctgacagcaggcgcacgaagtcggtgaatccctgggcgatggcgatattacgcagcttgccagtgtcggtgacgcgtgagagcagtacctggtgttgatagcggcgacggaggacttttttaacgcgcccgacaacgcccgccgcgctgttgtgttgtttcatttgcaggaacagcggatcgcccattaccgggcggttgagcagccaggaagaactgaccggatagcggctcatcacatccacttcggcgtgtggattgaggatgttgatggcatcaagtaagccgcgcaggatggcgctgtcgccgcggttgccgcaagtgtggttgcccagaataagtaatttcattttttcctcataaatttgatgccaggtgaggctgtgtttgttttgttcgttgccgttttttgcctgatgcgacgctggccgcgtcttatcaggcctacaagacccgagcacagaaccgtaggccggataaggcgttcacgccgcatccggcattcagtgcctgatgcgacgctgacgcgtcttatcaggcctacaggtcccgagcacagaaccgtaggatggataaggcgttcacgccgcatccggcattcagtgcctgatgcgacgctggcgcgtcttatcaggcctacaagacccgagcacagaaccgtaggccggataaggcgttttacgccgcatccggcattcagtgcctgatgcgacgctggcgcgtcttatcgggcctacaagatccaagccctgaaccgtaggccggataaggcgttcacgccgcatccggcattcagtgcctgatgcgacgctgacgcgtcttatcaggcctacaggtcccgagcacagaaccgtaggatggataaggcgttttacgctgcacccggcaaccgttgtcggaaccgaaaacaacaactcaccccgcccgtaaaagcattttcattttttcgctgcggcaaaactgacgcttcacttccaccaccagcggatggcgcgacagcacaatcatcaccacaaacgccagcacgcccgcggctatttgcaccgccagcagcatccccagcgccagttgccctttcagcacaatgcccagcacataactgaccaccagcgtcggcagcgagagataaaacggcagccataaactcaggatgtactggcgataactggaaccaagaaccggtttaatcatcacgaagtaactcagaatggtgttgataatctgcaccagcaggaaaccgagcgtgacgccgattgcgcccgccatctgcccaccaataacaatcgccggaataaacagaaatgttttgaatacgttgaatttaaagctgatatcgacccgcgctttcgccatcagcagcgaaccaatcgggttacccaccgaacgcagcagacccaccacacacagcaattgcagcaccggaataatgctgttccacttctcaccaaagaccagcggtacaaagttattcgacaccaccatcagcccgagcagcgccggaaagttgataatccccactaccgacagcagcttgtagaagttaacgcgcagcttttcggtatcgtcctgaattttggcgaatgccggaaacaacacacgggtgatgatcgggttcaacttcatcggcggcacaacggccacgttgtacgccaggttgtatccccctgccacgcccgcgccgagaatacgcgccagcaccagcgttgaaaggttggtattgagatagttgatgatgctgtccgccgtcagccaggcaccaaagcgtaagttcggtgccaccgacgccagcgagaagtgcagaccggggcgataaattttgcgtccaaagtagccaaacagcagcgttctcaccgcactattgaccagataaccgaggatcgcggtcatcgccagcggccagaaatgggcgctaaccaccgtaaaagtgaagcccaccagtaccgcgctggtttcgatcatgccgattttgttgaactccagctccttctgcatcaacgcgcggaactgttgcccgtgggggatcaccacaaacgccagcgacaatgttttaatcaacggtgccaggtccgggttattcagcacgtcgccaatggcatcactcaacaaaaacaccgccacgcacaccacaagccccagcccgacgttcagccagtacagcgtggtgagttcaaggtggctgatttcttttcgctgaataatcgagttagcgataccgaagtcagaaagcgtatctgctagcgcgatgatcaccagcgacacggtaagcaaaccgaactggtggttgtcgataatccgcgccagcacggtcatctgtaccagcccgaggccgatgatgatcaccgtagcaatcgccgaccacttcgcgccgctgatggttttttcacgtaagctcatatcaatatgccgctttgttaacgaagcctttgaataccgtcaggaaaacgattttgatatcgaaccagacgctccattcgcggatgtactcaaggtcgaactcgacgcgtttttccattttctccagcgtgtcggtttcgccacgccagccattaatctgcgcccagccggtaatgcccggtttcaccttatggcgcagcatgtagccttcaatgagctggcgatattgttcgttatgcgccaccgcgtgtggacgtggaccgacaatcgacatccccccggtcagcacattgataaactgcggcaattcgtccagcgaggtgcggcgcagaaagttccccactttggtgacgcgcggatcgttctgcgtcgcctgagtcaccactttgtcgttctccatcactttcatcgaacggaacttccacactttgatcggtttgccatccatgccatagcgagtctggcggaaaataaccggccctggtgaagtgagttttaccgccagcgcaatacagcacagcaccggggagatcagcagcagaataagcgtcgccagcacaatgtcttccgcacgtttgagcaggcggttaaccccggaaagtggcgtgtcatacagcggcaccaccggaacgccgttcatctcttcgagacgtgaatggagaatgttgaaggtaaagacatcggggatcagcagcaccgaacaggtggtgtccgccaattgatggaccagttttttcactcgtgcgccgtcgcacatttgcatcgcgatatagacgttatgaatcttgcccgctttcgcgtcctcgaccagctgttgcaggttacccgcccagtcgttagaaacgccgcccggtttcgggtcgtggtaaacgcccaccacttcaaaccctaaccacggctgattacggaagctctccatcagcatttgtccggcggctaaatcccccgccaccgcgaccatgcgcttgttatagccatgattacgcagccagcccgccccaatgcgaatacatgaacggcaaaccaccagtccgatactggtcagcccataccacgccagccagattttcagttgcgtgtcgaaatcattgttgaacgccaccagtccggcgctgaaaatcacgcttaaggtccagttttgtagcaacagggcaaattctgtcgctgcccgaacaccgcgccatgagcgataaaaatcggtgatgccgcccagcatctggaacaccaccagcgtaatcagcgccaccaacaggtgcatgtagaggaatgacagtccgctgacttcgcaaaccagccatagtccggcaaacatgatggtgatatctgaaaagcgttgcatcatagagattaacgatgcattggttttcgctcgctcgcgcttttttagatttgtcatcgttgttcctgttattagccccttacccgcagtggggtaagggaagatccgacattactcattcagcaacgtcagcagagttcgcgttcgcgcttccatcagcggcacatcaccgcgcgattccacattcaggcgcaccaccggttcggtgttggaggtgcgcaggttaaagcgccagtcggcaaaggtcatgctgatgccatcggtacgatccaccgccagcgcctcacggctaaaatgctgttcgacgcgattaatcgcctcaacgggttgcgccagtttgctgttgatctcaccgcttgccggaaacgcagccatccggtcgcgcaccagttcgcccagcgtttttcctttcaggcacaccagttcggcgaccagcagccacgggatcatgccgctgtcgcagtaagcgaaatcacggaagtaatggtgggcgctcatttcgccaccgtagatggcgtcttccttgcgcatacgttctttaataaaggcgtgtccggttttcgacattaccggggtgccgcctgcggcagtcaccacatcaacggtattccaggagagacgcggatcgtggatgatcttcgcgccgggatttttttcgaggaacgcttctgccagcaggccgacaatgtaatagccctcgataaactgccctttttcgtcaaacaggaaacagcggtcaaaatcgccatcaaaggcaatgcccatatccgcgccgtgtttgatgaccgcattgcgggtgtcgtcgcggcattccggcagcagcgggttaggaataccgttggggaaattgccgtccggtgtgttgtgcactttgattaattccacgggtgcgccgagggctttaaagcgggcttcgatggcgtccaccaccggacccgctgcgccattcccggagttaatcaccagcttgagcggcgtgaggtttttgacattgatataaccgaacaggtgatcaacgtaagcgtcacgcaggttgatttgctgatagcgaccgcgtttggtttcatcgacgggaggaaagtcgttggcttcagccaggcgctggacatcgcgcagtccggtatcaccgctgatcgggcgagccccttcgcgcaccagtttcatgccgttataatccatcgggttatggctggcggtaacttcgatgccgccatccacgccgagatggaacgtggcgaaatagatctcttcggtgccggacataccgatatccagcacgtcaacgcccgcatcctgtaaaccttttgccagcgccagttttaaggtttcgctggtgagacggacatcaccgcctaacacaatggttttcggtttgagaaattcgccataggcgcgaccaatgcgccaggcaatatcttcattcagttcttcgcctaatttcccgcgaatatcataggctttaaagcaggttaattttttcatatcgttaccctttttcaggcaatagttggccctgaccgaagcggccaattttgtttttgtcgttatttaccggagatttattccggttgattattcaactactacacccgtccgtagcgatccgcgaagcgcaccacatcatcctcttcgagataagagccggagcgcacttcaattaaatctaggggaattttccccgggttttccaggcagtgttttgcccccagcggaatataaatggactcgttttcaccaagcagtttgatatcaccgtcaatggtgacttttgccgttcccgcgaccactacccagtgttccgcgcggtgatggtgcatctgtaccgacaagccctcgcccggtttcacggtgatgcgtttcacctggtagcgatcgcccgcgtcgatagagtcatatttgccccacgggcgatacacttcgcgatgcacccgatgctcatggcgaccatcggctttgatctgctcgaccacttttttcacatcctgcaccgcgttacggtctgcaatcagcaccgcgtctttggtctgcaccactaccagatctttcaccccgacggtggtgaccaggccagattcggcatacacgtagctgttttcggttttgtgattaatcacatcgccgtggcaaacgttgccttccgcggtgtgggcgctgatctcccataaagaggaccaggaaccgacatcgctccagcccgcatccatcggcaccacaacggcatctgccgtacgttccataaccgcgtaatccaccgactcttccgggcaggcaagaaacgcttcttcatccacacgaataaaatcgagatccggatcgacggcgctcatcgctttttcgcaggcgtcgagaatatccgggcgatattttttcagttcttcgagataacgtccggcgcggaacaggaacataccgctgttccagtaatattcgccgcttgccacataggcctgagcggtttccagattcggtttttcgacaaactgcgccacttcaaaggccaccgtatcctgctcacccgccgacacttcaccgcgacgaatatagccatatccggtttcaggtagatccggcacaatgccgaaggtcaccagcttgcccgcttcggcatacggcatggcattacgcacggcggcgcggaacgcgtcttcgtcggcaatcacatgatctgccgccaggaccaacattaacggatcgctgtccgggctatgacgttctgccgccagcgccgccaacgcaatggcaggtgcagtgttacgccctgccggttcgagaataatgttctcggtgagtttgttcagttgacgcagctgttccgcgacaataaagcggtgctgctcattgcaaatcaccaccgggctttcgcactccacgccgttcaggcggcagatggtggtttgcagcatggtgagatcgcctttcaggcataaaaactgcttggggtaaagtacgcgggaaagcggccataagcggctaccggagccacctgccatcacaactggatagagtttcgactgcgccataattatccccgaatatcatgtataaattgacgtaacacgttctctttatcgagcgtgcgttcggcatattcacgtgccaccgtgttgtgtttgggcagcaggagcgcctgacggatccccgccaccagcgcctcgaccgattctggttctacgcaaaccgcaattcctgggaaggtttcgcaaagctgccccagttctgtgtgagcttctgcggtaattaccgcgttaccgcctaccgccagaatattggtcagtttcgatggcaatacggcatctgccgcaccgcgtttttgcaccaccagatggcagtcgcccatcttcagcagtgcaggcaaggcgtcatacgattgcagcgggaaaaattgcatattgcgcagtccgcgctgctgcgccattttttccagccgcgctttgccgccgccctgcccgacaatggcaaaaatcagcggttcatcgcgcaggcgatcggcagcttcaataacgttttccagcccctgcttttcaccaatattgccggagtaaagaatgatttttttgttatccggcaggccaagctggttacgaagggcatcaacatcggcgtctgcaacatattgaaaacgggcgatttccgaccagttggggaagaagatgacgttttccgccgccacgcctttttcgatggctttattcatcatcgagcgcgaaatcgtggaaacgttatcgacgttatgcagtccgctacgttcgaaggctgtcgccagctgtgccactttgccgcctttgccttttccggcaaggcccagccccagcatcgcatctacttcgtaatcctgaatatgcagcacggtacgcgcaccagagagtttcgccagcaggcgcattcccggcgtgcaaaacagcgttggcactacgccgataatgcgatccggcttccagcgacgttgcgccatcaacgggaaaaaactgctgacggcaaaactgccgagatgcaacaggcgtttcagggtgctcggctgttttggcacatacagcgggcagcgccacaccgtggcggccccctcttctcgtttgtagcgccaggcggaatagttctcgcccacctgccactgcgggtagtaaggcggtgcggtaatgacccgcacctcatgaccttgtgccgcaagccattccaccatctctccggtgtatttgccgatgccggttaactccggcgagtagttaatgccgtagaccagtattttcataatccgggtactccggcacgcttctcagcgagaaaataggcgcggctgttagcgtgaacattgtcactggcgagcagtgcgtccggcgtcagccagcggtaatcgtcatgctgctcatccggcagtaacagttcttcttccgctactctgaagcgaaaaccgagcaccacatagtgagtggtgaaatccgtgccggagaagttatcgtcataaaagtgctgccagacaccgtaaaactggcctgctgttatcggcagacgcagccccagttccgccatcgtcagccgctcaaatgcggcttccagcgtttcgtctttctgcacgcgccctcccggcacaaaccagtaaccctgcgccgggcggttggttcttttgccaagcagaaactcgccgcgactgttctcgacaataaagtcgagagagacaagcggtgtggagcgcactaccgtggcaaagtcttcctgacgtaaaaacatcattacccccgaaagcggtcttgattctcaaggaaccactggtaagtgctggcaagccccgcttccagtgagatttcgtgataccagccaagctgatgcaggcgcgtcacatccagcagtttgcgcggtgtgccatccggtttactggcatcaaaaaccacccggcctttgtaacccaccactttggcgatggtttgcgccagctcgcggatagtgcagtcaacgccggtaccgacgttaatgtgcgacagcatcggctgggtgttctccagccagacttcgtgcgccagctccatcacatgaatgcttgccgccgccatatcatcgacgtgcagaaattcgcgcatcggtgtaccgctgccccataccaccacgtccggtgcattctgtgccgtcgcctcgtggaagcggcgcagcaatgcagggatcacatgcgaattacttggatggaagttgtcgtgcggcccgtacaggttggtcggcatgacagagcggtaatcgcgtccatactggcggttgtaagattcgcacagtttgatcccggcgattttggcaatggcgtatggctcgttggtcggctccagcgtgccctgtaacagctcgccttctgccatcggctgttttgccagttttgggtagatgcaggacgatccgagaaacagcagtttgttcacgtcgttctgatgcgcagcgtgaatgatgttgctctcaatcatcatattctggtagatgaaatccgccggatacgtgttgttggcgacaatcccgcccactttcgccgccgccagataaacctggtcaatgcgctcgctggcaaagaaatcatgcaccgcgcggctgtccagcaggttcagttcgtcgcgggtgcgtaataccagttccacatcaccgcgctgttcgagctgtcgcttgatggcagaaccgaccatcccgcgatggccagcgataaaaatacgttgtttactcatgcttatgactccagcgcgatcgccacgtcgtagccgtgagatttcagcagagagtgttttttcgccgcttcgaggtcattagccaccatttcagataccatctctctgagggtgatttccggtttccagcccagtttttcgtgcgctttggttgggtcgccgagcagcgtttctacttcagcaggacggaagtaacgcgggtcaacggcgataatcacatcgcccggtttaacgcccggcgcgtcatgcccggtgacggaaaccacaatgcccttctcttcaacgcccgtgccttcaaagcgcagtttgatgcccagctgtgctgccgccatttccacgaactgacgtacggagtactgaacgccggtagcgataacaaaatcttccggttgttcctgttgcagcatcatccactgcatttttacgtagtctttggcatggccccagtcacgcagggaatccatattgccgaggtacagacacgactccagcccttgagcgatattggcgattgcgcgggtgattttgcgggtaacgaaggtttcgccgcggcgcggggattcatggttaaagagaataccgttgcaggcgtacatgccgtaggattcgcggtagttaacggtgatccagtaggcgtacagtttggcgaccgcatatggagatcgcggatagaacggcgtggtttctttctgcggaatttcctgcaccagaccgtacagttcagaagtggaagcctgatagaaacgggttttcttttccagaccaaggaagcggatcgcctccagcagacgcagcgtacccatcgcatcaacgtctgcggtatattccggtgactcaaaagaaaccgcaacgtggctcattgcgcccaggttgtacacttcatccggctgcacttcacgcaaaatacgcgtcaggttggaggtatcactcaggtcgccataatgcagatggaatttcgggttgcaggtgtgcggatcctgataaatgtgatccacgcgctcggtgttgaatgacgatgcacgacgcttaataccatgtacctcgtaacctttttccagcagaaactctgccaggtaagaaccgtcttgtccggttacaccggtgatgagagcgacttttgacatgtcttattcctctgtattttttgaatttattcagtttcaacgcgttcgcgtatcaccactgcgggattcccccggcaaactctatttgccggaagcgatttaaaaacactgcttcgcgcacccacgacggtgccgtcgccgatcgtgacgccaggagcaacaaaaacatcggttgccagccagcatttctcgccaatcacaatgggcgtggcgtttatggtgaaatgtcgacttgcatggtcgtggctcccggtgcataaataacttttttgcgatatcaccgaatgtgcgccaatggttatttcaccgagggtatataaattgacctcatcgccgacccacgcgtaatcacctaaggttaatttccacggataggtaatttttactgacggacgaataactacgttttttcctatttttgcgccgaataaacgtaataaaaatgcccgccagcgatacaatacttgtggcgaccaggcaaataatgttgcctgtactgcccaccacaattgcactttaatagcgttgccgccccggaatcctttcggcaccgagaaaccgcttaaatcttgcattggtattccttatattcagactttgttatataaggctttagtcttacccgtcgtgcgctggcgtaaatgccaggataattcaacccagaagccaggcacatgtaatatttgccgttggacttttttggcgtccgcgcacaattccatattattggtggtagataccccacccatagaaaattcagacaccaggccattgagttttttaaatgcataaccggctttatacattttggccgccagcgcataatcggaagaaactttatactccaggtcataacgccattttttcaagccggataccgggaaaaatatcgcctgatgactggcgggcaggctgtgataaatataccagccaggtttggcgctacgtttaattttatgcccgtcgccaaaatccagcagcgcatcgccggtgatcatcacgttatctttttgcatttttaacttacggacaaaatttgcggcatcctgatgaaaaatatcgcccgagttgagaaacagcgcaaacttgccttgtgccatcgcaatgcctttgttcatggcgtcgtagataccgttatctggctcgctgacaaagcgtaggttatagataccattgagattttccaggtactcacgggtgccgtcattggaaccgccatcgacaacaatccattcgaagctgatatcgtcagcctgcgccagatgcgccagcgaggcgtgtgttttgactatcccttcgaggttacgaaacgcaacggtgattatgctaagcaacatgttcttacctcgtaatacccgtcatacttcaagctgcatgtgcgttggttttcctcgctcaccccagtcacgtactcgtgtacgctcctggggattcgctgcgtcaccaacttcctgcaactcgaattatttagggtgtatatttaacgcttttcgcaaaataaatggacagacgattaaaaatgcatattccgggctaaatatcgaaccggtaaaaaacagcgacaccggagtaaaaagatagagctgcacacgaaaattgcgattatcaccaaaagcgttgatcatcatttttatcactttccccatgtaccacagtgataaaagcactgcgaaccaggaaaaataaataatcagtagatacaaaccattgtctatggtttttccgacatccgcaccgttaaatattccgaatgatgcgacatattcataaagtgagccaaatctgactacaccgtcaatatggctcaaagaataaccgaccatcaccagtggaccgacaatgcgataatacgatgacgatccttccgtacctaaatcgcccaagcgggtggaaatataaggaaacgcgattaccacaccaaccaggaatacagccagagaaatcaatgctaacggtaactttttcttaatcgcctctttgttcagatattgaaacgcccactccaacaaataaaacaggataaaggtcataacccctgaaaacgatccggataatattatccctgcgagaatcatagcatcggttttaggcgttttgataccaaactgtttgatgctgagccaaattgagattaatgccagagcgaaaaatgccggttcgaaataaagtgctgtcgtacgcttgccgccgaatttaatgaaattcagcacataactgttgctgtaaatcagatatttcgaaatcgactccataatactgctgccgccagtgaggataatttgcgccatctccaccgccgccagcgccaccaccagccccacaaccagataaaagaaacgtaatatcttgcgatggttgtgtggcgaaatcgttttaaagcgaatactccacaccatgccaataatgatcacaatatagacaaacagcatagttgaagtgacgtatttacttgcatccagcgactgaccaaacaggtagttaaacgccgtgagtcccgcaccaatccctaaggcaatcatcaattttttaacgctgatgcgctctaaaaacagcagtaacaagacaggtaaaaaagtgacgatggtgatggggaaactttcgccaagctgggcgattttgacgttaaccagcaggtaaatcagcggcagcagcaggtagctacagattctgatagaagttgacatactcctccagcatctgttgtccactgtaggcggcgcggctgcgctggctgaactcagccagcgtggtaccaaatatcgcctgcgcgatttccggtttgcttaactgcaccagttgcagcacctcttcttcgctgacggtttttccgccggatttttgcagcacttcccgcgccgcatcgctatgggtggcaatcaccggcacaccaattgataacgcctcacacaaaatcagcgggtagttatcgacgcgagaactgaacaccagcgcatccatctgattgagcgcgctcatcaacttgcgcttgtcagtttcaaagccatgattaaccacgttaccagcagtgaacggcgagaacttaccgaaggtatgcagttcgattttgtcgcccagcgctatcatctcgcgcaccagttgctggttagttttgccgtcgtaacgcaggtcatgcgccaccaccgcgattttcggcttaccctgggtttcgcgcaccggaggcaagtctgccagaatcgcttcggttgccatatcaataccgttattgataatccggcaacgccctggaccgtacaggctattgaaagcatcagccacatgctggctgggggaaataaactgacagcccagcgccagcatctcgcggaataactggcgtttgcccgccaccagctggtgtgcgcgatcaatcttcaccggcggatagttatttaaggtcgggcatttctgacagcccgttttccagccttcgcacccgtcggtaaaagcgcagcgtccggtaacgctccagtgatcgtgcagcgtccagaccagagtgacatctggtttgtggtttttcactttttcgcaaaagcgcaccacgctcttaagattcaaccagtagctgtgcagcacatgaaaatgcaggactaccggtcccggtgtgcgagtaatggtgcgatataactcattgaaattgccgaacagatcgcgattaaacagacgaaacagggcaatgttcgccatcgcggtcatccgcggcgtatgtttgatgacctgcggatagttctgatggctgacgctctctttgccgcctttgccgtagccgtagacaaaatgtgacgccagcccctgttgcagcgcgcgctggtggagatctaacgccacacctgccgccccgccttccgccagtcgcacattaaattgcagaatattcatttaattaccttcactcgcgctttttctcccaccaccagcgcgttgtccgggattgcgtcgagcaccacgctgcccgcccccacggtaacgttgttaccaatcgtgatatcgccgagaataatgacgttggcaccaagttcgacgccgttgccaatgtgtggacatgccatgttatcggcaccacgattgccgatagtgacgccgtggcgaatggtgaaatcatcccccgcgaccacgtttttattgatcactacggcatagccgtgatggatagtaaagcgtcggccaatggtcgcggcggcctggatttcataaccgaaaaagcattcggtgataatgcgatacagcaccaacagcggggccgcccacagattgttgaggacgttttttttgcgccacactgaacaaaaatgagcaacgcgataggcaagaaccatgcagcacgggcgtaaactccagctgttggcgcgcagatcttccagcatctttagcgcccccgaattccatcagccagacgtttgccgttacgcactgacagcaacgtcaacaaagtgcgccaggtcatgcgtttattgcggatctggtagagggtaaacaactgatattttttgctggcgcggtcgaatttgtctttgtgcttacgataaaagtggaagtacccggagaattttttcggtgacgaggtgatctgcatttcgccgtgattgatatgcaggatttgcgtcgcctcttccactttccacggttcgccgtactccaccaccattcgcaggaagatgtcgtaatcctgtgccgctttcagttcggtatcgaacaagcactctttgaaacgccacgcccagctaaatacctgattaccaatgatattgcgtttgtagaacaggcggcgtgaatacggcgatttgggatacagcggcaagcttgccggttgggaataaacttcgccctggcaaacgtagtcgttggcgtacaagaacgcatgtgtgaccagttgctgtttatgggcgaggaagacgctcaggcggttgggtgtccattcatcatcgtcatcgatcccggtgatgtattccccttgcgccagcataatcgcctggttacgtaccgcgcacgccccgctgttaatgtcgttgtgaatgtacgtaatgcgcgagtcgttgagggcggtgacgtattgttgcagctgttcccaggaggtggagcaatcatccacgataatcatctcccagttgctgtagtcctggcgcaggaccgattttatcgcccgaatcgccagttgttggcggttccaggtcggaatatagattgagatcagcggattgtctttcataggttgttctcccggagtatcgagatgttctgccggtttataagctggtttacaggttctgttgccggatgcggcgtgaacgccttatccgacctacggagcgggtttgcttgcctgatgcagcgtgaacgtaggtcggataagatgcgtcagcatcgcatccgacagcggatctcgttatttcgcgtccgacttatattcgtattcgtaatagccataatcctgatacgcgctggcgcggcggaagatagagttcagaatcacccctttcaccggaataccgttttgctcaaagcggctcagactggtttccacttctttcaaggtgttgaccgcataacgcgccaccatcaacgtggttccgacatgccgcccgacaatcgcggcatcggtcactgccagaatcggcggcgtatcaattaacaccaggtcgtagtttttactcgcccagttcaccagttcggtaaagcgttcgctcatcaacagttcagaaggatttggcggcacctggccgcgcgggatcaggtcaaatttggcaatagaggtcggtttagcagcggtagtaatatcgccctgaccaatcagaatttccgacaggccattgacgttattggtgcccaacagctcgtgggtgtagcctttgcgcatatcgcagtcgatcaacaacacccgtttattggtctgactgatcaccgccgccaggttagcgcagacaaaggttttaccgattgacgggctaaccccggtcatcatcaacacattgttctgtgcctgcatcatcgcgaagtgcaaactggtacgcagactacggatggcttcaatcgccagatcggttggattccccaccgccagtagctggctctgtttatagcgtttaacccctttgatggttttgacgctatcgcgcgctttttgccattccgacagcgggatgctggcatagacgctgatgccgtgttcttccagcacctgcgggctttcaatgccgcgattgaacaacgagcgcagcagcacacccacgatagaaagcatcaggccgaggatgattgcgccgagaataatcagccctttcttcggtttcagcacgccaggctgggtgattgccgggtcaacaatacgcacatcgccgacggtgctggcctcggtaattttcagctcctgctctttattcaacagttgcatatagacctgctgcccagactcgacatcgcgcgtcagacggacaatctcctgctgggttttcggcatcgccgttacgcgaccgttaagtttggctttctcttcttccagtgcctgacgtttctccagcagcgtgcggtacgccgggtgaactttggtgtacagcttagagatttccgcctctttaaaggtcagttcgttcaactgcgcgtcgatgttcaccattgaatcaagcaccgctttcgcttccagcggcagatcaacagaatctttatcctgacggaaggcattcagtttgttttcagcaacatcaaggcggctgcgtacttctggtaactgttgcgcgaggaaggcgaggcttttcgacgcttccgccgatttgcgctcaatattttgttcctgatagttacgggcgatactgttaagaatgtcgcggatctgttcgcgatcttcaccggtataagtcaggctcagtacgccagcgtctttgccattctctgttaccgtcaggctgttttgcagttgattgatcatccccagcgtggagtatttagtgacggtaaactcactgcccgggctggcgtgaatggcttcaaccatcagcgtgacgccttcttttttcagcatctgacccgcttgcccacgagcgctaaagccgccgtcgctgctcaaagtgtagtttttgttgtccagcacattaagcgtaaacacctgatccaccatctcttttggacggttaaaggtggtcacttttactgtctcgttctgacgtcccatcaggcgatcccagcccgcaccgaaaatcgggaacgtgtttttgctcaccgcaatatcgaggtcgagatcgtccaccgttttaccaagcaccaggcgcgaacgaatcaactggatctcagcatccgatgctggcggtttgttggctaatgccgagccgatatcctgcactaacgaattgccgctgttttgctcgatttgtaccagtgcgtcggcgctgtatatcggcgtggcgaagaaggtgtaaaccacggcacagagggcgaatacggcggtgatgccaattacccaccagcgcgcttcaatgacggtgccgaccaggcgaccaatatcgatttcatcactgcccgttaccggagcggcatgttgttttactttttctgtcattgttatacctgctctgcgttcaatgcctgcgcccactggcgggcagaccgttcaagtaatgtgtacaccgctgcaaacgtttcccggcttttgcgatacggatcggggatttcacattcgttatcccagtgaccaaacagcatcactttgccgcgcatctcaggtgccatctcgcataagcgttcgatatggcgcttttccatggtcaatatcaggtcgtagttgcgacacaggcggcggctgatttgccgtgcacagtgaccttccagagacagttgatgttctgcggcgacgctgatagcggtaggatcagcccctttaccgaccagtgcgccgagaccagcggattctactttcagctcagggtgataacgttgcagtaagcgttccgccgtcggggaacggcaaatattgccgacgcagacaactaagatattgttaaacatgacgattaccagttatgaatgtcgctggctgtatccgtcatgtaacggacaccgctaatagttggcagcaactgattgatcagacggttccagcgggaaaccggggcggtggtgacatacaccacgtcataaggctgcaggcggaattctgtcgccatcaccagcgacgtggcatcggacatatccagttggtagatattggcgatcttgccgttacgcccgccctcgcctttcaatggacgaatgacaaagatgccgctggcgttggaggtggtcatgtcgataccttcggcattgcccagggcttcagtcaaggtcatgccgctaaagtccattttcagggtgctctgtttcttcacttcacccatcacaaatactttcagatcatcattacgcggcacgtagaggatatcgccggggtaaagcagtcgattctgattgaggtcaccgttttgcatcagcgcctgcaaagaaatgcgttcttcacgaccattgtgtgttagcaccacgttgcgccagtcagcggtatcggtcaggccacctgcggcgttaatggcatcgagaatggtcagtggtacgttggtgatggcctgttgaccggatttattcacctgacctgagatatacgctttttgcgagcggaaggcggcgatattaacgtccacctgcgggtcagcgatgtacgtcgctaagcgcccggtaatatcactgcggatttcagcgagcgttttccccaccacgtgaaccttgccgatatacgggtagaacatagtgccgtcaggctgtacccagttgccggtgtcgctggagctgcggtactgaccagctggagtggtgagttccgggtgatcccagacggtgacattaagaacgtcgcccggcccgacacgatattgataattggcaatctcgctttccagcgtcatattggggcgcgcgacgttcgggcgtggacgtaattgatcaatcaggcgcggggtcagcggataaacattcaccattttgtcgagatcgaaatcagcatcctgctgtttgatgacgtctttacccatcgtcgacatattgctgcccggaagtactgtgcaaccgcttatcaaggttactgacaccaataatggcatcaatttcattttggatttcatcattgtttatttatcactttggcagagtaattatcctgtgcactattaatagcaatgtcgccatgcacatttaccttgcagttaattgaataaaaatttaactggcatcagtcctaaaaaaattgatttcatccgcaggctattgacagaataattcagactggtctttcaggcatccagacacgctaccgcccctggctttttagctaccaatacactgatttagtttagattttccaactctttcatcatgcagtcgattatgaaaaagcgttattccgtgaattaattttccagatataaggtggcattatggtatttgaatattggcttccaataatgcaggaggaagtgttacagctaacggaatagcaggcaaggtaacaattcggcaattggctatttttaagaattatattaagtgtcaatcaatatgttttttaggactttctttaggttgacaataattaatatagtgtctccatatgcgatatttcttaaataatgttttattattgccacttttaattcagggataatgtgaggttataaccctcaaattatatgagataaatagtgctgcaacattgcatttttgccccgatttatccatgatcgaattgtgacatttgtcatacaacgaataggttttgtacttactatggaatggattgccgatccgtctatctgggccgggttaatcacgctgattgtgatcgaactggtcctcggcattgataacctggtctttattgccatcctcgccgaaaaactaccgccgaagcagcgcgaccgcgcacgggttaccgggctgctgctggcaatgttaatgcgcctgttactgctggcgtcaatctcctggctggtcaccctgacccaaccactgttcagcttccgctcgtttacctttagcgcccgcgacttaatcatgctgtttggtggtttcttcctgctgttcaaagccacgatggagttgaacgaacggctggaggggaaagacagcaataaccccacgcaacgcaaaggtgcgaagttctggggcgtggtgacgcaaattgtggtactggacgccatcttctcacttgactcggtgattactgccgtcgggatggtcgaccatttactggtcatgatggccgccgttgttatcgcgatcagcctgatgctgatggcaagcaagccgttaacgcaatttgttaacagtcacccgaccatcgtcatactctgcctaagtttcctgttgatgattggctttagcctggtggcggaaggtttcggcttcgtcattccgaaaggctatctgtatgctgccattggtttctcggtgatgatcgaggcgctcaatcagttggctatctttaaccggcgacgttttctttccgctaaccagacactgcgccagcggactaccgaagcggtaatgcgcctgcttagcgggcaaaaagaagatgcggaactggatgccgaaaccgcgtccatgctggtggatcatggtaaccagcagatctttaatccgcaggaacggcggatgattgagcgggtacttaatcttaaccagcgtactgtcagcagcatcatgacgtcgcgccacgatattgagcatatcgatctcaacgcgccggaagacgagatccgccagttgctggagcgaaaccaacacacgcgtctggtcgttaccgacggcgatgatgcagaagatttgctcggtgtcgttcacgttatcgacctgctacaacaatcgctgcgcggcgagcctctcaacctgcgggtgttgattcgccagccgctggtgttcccggaaaccttgccgctgttacctgctctcgagcagttccgtaatgcccgcacgcactttgcttttgtggtggatgagtttggctcggtggaagggattgtgacattaagtgacgtcactgaaaccattgcaggtaacttgccaaacgaagtggaagagatcgatgcccgtcatgatattcagaaaaatgccgacggttcctggacggcgaatggtcatatgccgctggaagatctggtgcaatatgtgccgctgccgctggatgaaaaacgtgaatatcacaccattgccgggctgttgatggaatatttacagcgtattccaaaacctggcgaagaagttcaggtgggggattatttgcttaaaacgttacaggtggaaagccatcgcgtgcagaaggtgcagattattccgctgcataaggatggcgaaatggagtatgaggtgtgatggcatgtaggcctgataagacgcgtaagcgtcgcatcaggcgtttcattcaaccgggagagtatgtgacattagaggctgttccgttcactttatgttcctcgctactttggaacgctcaagccggtgaacgtgccagggtggctcaatcgccaccaccctggcaacccgggctcccggcggtaaatcgccgctagcgcggtcccctcatcttattcctttcggctatcgggtacgggcgcgaggtaacatccctgtaaaacgcgccctcagcccacatccatgtgggctgccccggcctacaggaaacgattcggcgatttacagccggaccaacaccctcgctgaagtatcttacttatacagatgattcatctttgctgaaagtaatctacgtgattgcctgatgcgacgcttacgcgtcttatcaggcctacagcatatgtcatctggatgacttacatcttctccagcaacttcttcacatctttgccattgcgggaatctttattccgctcggcccagtcattcaggcgacgtttcgcttcgtcctgtagatgtttgcgtagcagctggtccacttgcaggctgtaattaagttgctgccagttgccataaacccgcagcggtactggcgtttctttgaggaaatcaatcagtttgctttccccgttccagccacccacgacccgaatatcaaactgggtgtcgcaggtttgatctgccaaattcaacatgccttcccctgtcagcgccagcacaggcgattgaccttgcatgtcgtttaacgtcacgacgccatccttcaacgtcaaatcggtggtaaagcggtcaagacgcgtcacgttatcgaagttttcagcggccttcacatcaccaccattacgctctaccgcttgctgaatcatctgctggaagttcatcccttccatgcgtgtgtccgtcatttcgacatgcgcctgtccttgccagttgtggcggaatgcgtcggcatctatgtcagcaccggagaaatcaccagccagtgacatctttccggtcaacgaaatcggatagttaaacgccttcagaatggtgccaatctcaacgttttccagtcgtggctggaagattatccgcggacttgttgatgttgcatccagcgtgcccggcagcgaaacctgtccaccgttaagcttgccctgcagttgagtaatttccagcagacccgacttgttggtcatttgcgtggcaacatctgtaaaattcattccgcgccagcgcacgttactggcctgcaacaaaatatcagccgtaaagccttgcaatccctgataggccggttcatcaatacgcgaagaaatgaccgggcgcggcaacgtggattggctctgcccctgctgcgcggcaccgttttcaccgttcgctgtttctttaagcgggatgaggttgtcaagattcagttgcgggaattgcagtctcagctgccattccggtttctctgtcagcgtgacctgtgcttgcccgctcagcgtactgtcattggcggtcaaactaatttggttaaatgaaaggcgtttatgtgactcctgccactgggcctggaaactcccctgcccctgaataccttgttttggtaaatcggcaccctgcaactgccagttaatttgttcaatagccgccgttaaatcatgcggataatcagaagcatctaccgtaccgttaagggatatcgtgagatcgcgctgatcgcgattaacccgcccggagaactcaaatgaaccacgatgttggggatcttgttccatttgcaggcggatattacggattgtcacctgctcgtcatcttcatgctggaacaccagcacgctgtccgccaccttaagactggatatatcaaacgaccatccgcgatcgtctgacagatccggcaaggtattgtcgcgcggtgcaaccggggcatcttcgctgcgtaccgcttccgtctgcggcgtcagttggatcactgccccttttagcatcacctgcttaacgctcagttgatgactcagcagtggtaaaagcgccacgtccagacgcatgttgtctgcgcgaaccagtggctggctcgcgccctgggcagtgagagacattcgcccggagaggatactaagttgcggccagacgtgccaacgcagtggcccgtcgagctgcaattgataaccgctacgtgcagcaacttgcttgaccatatagtcgcggaaatcattcggattcaccagcaacactaacgcagataacccggccaccagcacgaccaggagtatcatcagcgtcgtcagaaatcgtctcatggtatcctcaatgggcctgaattagtctttatcgattcggctggctaccgcgccctgctggttgcgatatttcgcatcttcacggcggttgtaaggtcgcgccgccgggccggaaagcggctcaaagctcagcgcaccaattaacatgcccggacgcagcgccagcggcagcttaccggagttgtagaactccagcacaatgcaaccagaccagcccggatcgatacggtgcgcggtgacgtgcaccatcagccccagacgcgccaaagaggaacgcccgtccagccagcccaccagatcggctggcagcgtcaccgactccagcgtcaccgccagcgccagctctcctgggtgaagatagaacgcctcgccctcgtcgagaacgatctcatcgctcatcacgcggtcaagcgcggcgctcacttcatctttgggaccgctcagatcgataaacgctgccgtgtgaccacggaaggtacgaaatttattgcccaggcgtacatccaccgtcgcgccgttaatacgctccactggcggacgtgggttgatcgacaaacggccttcatcaagccaggcttcaatatctcggtcacacagacgcatggcattttctcctttcgcgcatcactcccttaacgccaattacgtcaagggcataccaggttatcactgaacggtacacaatttatcaagcttattcaaagaactgacttattttcgctttcaatatatcgatcgcgatgcggtttttcccgccgcgcggcacgataatgtccgcatattgtttagaaggctcaatgaattgcaggaacatcgggcgcacggttttttgatattgcgccatcactgaatccattgaacgcccacgctcgttaacgtcacgcttgatgcggcgcatcaggcagatatccagcggggtatcaacgaaaatggagaagttaagttcgtcacgcaaacgcgcatccgtcagcaacaaaatgccttcgagaatgatgaccttcttcggctcaaccgtcaccgtttctttcatacgcgtatgttcaacatagctgtaaaccggcaggtcaattgccgagccgcgtttcaacgcttgtaaatgctcaagcaacaggctgtgatccatcgcgctgggatggtcgtagttggtcttaacgcgttcttccatcgacagatggctttgatctttgtaatagcagtcttcgggaattacgccgatgtgttcatcaccgacttgctcacgtaattcacgataaagggtactggcaataagactcttgccggaagccgatgcgccagcgataccgataatgacgcactgatgagactgatcagtcatatatttagcgacctgattaacctggatgttaggaagggggcgacgaagcgccaaacgcggcaattatagggatttcatccgcctgataccagtcgaatagcgctgccgcgcgctcagagttaattgttgacgaagaattcccggtggcaaattacgttgatcagttttatacaaggtaaaaaatgttatacgcagttgcgcaaattatccgcctttacgtcactttatgagcaattcgcatataaaatgtaaaacttttgtactagcataaacacagaaacgaatactggcgacctggtcttgcggataaagcggtaatgagcaaacaatcacagcatgtattaattgccctgccccacccgctgcttcacctggtcagtttaggtttagtctcgtttatctttacccttttctcgcttgagctttcgcagtttggcacccaactcgccccactgtggttcccgacgtccatcatgatggtggcgttttatcgccatgccgggcgcatgtggccgggaattgcgctgagctgttcgctgggaaatatcgccgcatccatcctgcttttttccaccagctcgctgaacatgacctggacgaccatcaatattgttgaagccgtggtcggggcagtgctgctacgtaaattgctgccgtggtataaccccttgcaaaatctggctgactggctgcgtctggcactcggcagcgccattgttccgcctctgttggggggtgttctggttgtcctgctgacgcccggagacgatcctctcagggcatttttgatatgggtactgtcagaatccatcggcgctctggcactggtgccgctgggattgttatttaaaccacactatctgctgcgccatcgcaacccacggttgctttttgagtcgctgctcacgttagccatcacactgacgttaagctggctttcgatgctgtatctgccgtggccttttactttcattattgtgctgttgatgtggagcgccgtgcgtctgccacgaatggaagcctttttgatcttccttaccacggtgatgatggtgtcgctgatgatggccgcggatccctccctgcttgctacgccgcgtacgtacctgatgagccatatgccgtggctaccgtttttgctgatcctgctgcccgccaacatcatgaccatggtgatgtatgcctttcgtgcggaacgcaaacacatttccgaaagcgaaacccactttcggaacgcgatggaatattccgctatcggtatggcgttagtgggcaccgagggacaatggctgcaaaccaacaaagcgctctgccagtttctcgggtacagtcaggaagagctgcgcggactcacctttcagcaactgacctggccggaggatctcaataaagatctccaacaggttgaaaagctgataagcggtgaaataaacacctattcaatggaaaaacgctactacaaccgcaatggcgatgttgtctgggcgttgcttgccgtctcactggtgcgccacacggatggcacgccgctctattttatcgctcagattgaagacattaacgagctaaaacgcaccgaacaggtcaatcagcaactgatggagcgcatcactctggctaacgaagcgggcgggattggcatctgggagtgggagttgaagccgaatatttttagctgggataagcggatgttcgagctgtatgaaattcctccacatatcaaaccgaactggcaggtgtggtacgagtgcgtgctgccggaagatcgccagcatgccgaaaaagtgattcgtgattcgttgcaatcacgctcgccctttaaactggaatttcgcattaccgtaaaagacggtattcgccatatccgcgccctcgccaaccgggtactgaataaagaaggcgaagtcgaacgtctcctcggcatcaatatggatatgaccgaagtgaaacagcttaacgaggcattgtttcaggaaaaagagcgcctgcacattacgcttgattccatcggtgaagccgtggtctgtattgatatggcgatgaaaattacctttatgaatccagtggcggagaagatgagcggctggacgcaggaagaagcgttaggtgttccgctcctgacggtgttgcatattacttttggcgacaacggaccattaatggagaacatttacagtgccgacacctcacgttccgcgatcgagcaagatgtggtgttgcactgtcggagcggcggcagttacgacgtgcattacagtattacgccgttaagtactctggacggcagcaatattggttcggttctggtgattcaggacgttaccgaatcacgcaaaatgctgcgccagctgagctacagcgcctcccatgatgcactgacgcatctcgccaaccgcgccagttttgagaaacaactgcgtatcctgctgcaaacggtaaacagtacacatcagcgacatgccctggtgtttatcgatcttgatcgctttaaagcggtgaatgacagcgccgggcatgcggcgggtgacgctttgctgcgcgaactggcgtcgttaatgctgagtatgctgcgttccagcgacgtgctggcgcgactcggtggggatgaatttggtctgctgctaccagactgtaatgttgaaagcgcgcgttttatcgctacacgcattatcagtgccgtgaatgactatcactttatatgggaaggccgtgtgcatcgggtaggtgccagtgccgggattaccttgattgatgacaacaatcatcaggcggcagaagtgatgtcgcaggctgatatcgcctgttatgcctccaaaaatggtggccggggccgggtgacggtttacgaaccgcagcaagctgccgcacatagcgaacgggcggcgatgtcgcttgatgaacagtggcggatgattaaagagaatcagttgatgatgctcgcccacggtgtcgcttcgccacggatcccggaagcgcgtaatttgtggctgatttcacttaagctctggagttgcgaaggcgagattattgatgaacaaacatttcgtcgtagcttcagcgatccggcacttagccatgctcttgaccgacgggtattccacgaatttttccagcaggccgcaaaagcggttgccagtaaaggcataagcatcgccctccccctttccgttgccggtttgagtagcgccacgctggtgaatgatctgcttgagcagctggataatagccctctaccaccacggttattacatctgattattccggcagaagcgattttagatcacgcagaaagcgtgcaaaaactgcggctggcgggatgtcggatagtgctcagccaggtgggccgcgatctgcaaatcttcaactcgctgaaagcgaatatggcagattacctgctacttgatggtgagttatgcgccaacgtgcagggtaatttgatggatgagatgctgattacgattattcaggggcacgctcagcgactcggggtgaagactatagccgggccagtcgttttacccttagtgatggatacgctttcgggcatcggcgtcgatctgatttatggtgatgtgattgccgatgcccaaccgctggatttgctggtgaatagtagttatttcgcgattaactgagggagcgtttgcccattgcctgatgcgacgctaacgcgtcttatcaggcctacaaatctacaaatcgctcattctccaggccggataaggcgctcgcaccgcatccggcgaccaacgtcatgcttcgtctggttgccagccttccgtataccagatatgcaacagcgcataagagcgccagggcttccagcgttcggcataacggcggatttgtgctggtgtcattcccggaaatcgctgtttaatcagataatcatccggcaggaaaacatctttcgcctgccagctacgcaaagcgaaataattcgccgtccagcgcccgatacccggaaaagtttgcagcgttttcatcgcttgttctacgtcgcccggtattgtcattggtaaggtgccctccagcgccgcatttgccagatgaatcagtgcctctgcccgtttcaacggcatgcctaacgcttttaatgcctgcgggtctgctgctgccagccgctgaggcgtggggaagcagatatactccggaaaatcatccagccgttcgccataaagctgtgccactttggcggtcaattttgccgccatcgccacgctcaccagttggcctaaaatggcacgcacgccctgttcaaaagcatcaacacagccgggtaaacgcaatccgggccgcgccgcgcctaacttgcccaacgcaccgttaacaatctgcgggttacattgcagatcaagcaggcggctcattttcgccatacactcagcggcaacgggttctaaacctgcacttaaatttatgtgcagagtatggcgggctatatccggaatagcagtcaccacgccgcgatattcgcccaccgccagactacgggcataataactgtccgcgacagtttccacaccactcaccgcacgggcggcgagaaatcccaacatccacgaccagtcatacggcggctgccagttcagggtatacatcgcatctccttgttaatccgctttcagcataaacgttattcagacgctacgctttgctttcatattccggttgtcgcgacggcaacatttcgctaaagtcacgccccttcttcaccggcatggggattatttcgtgtttattggttttgattacggtacagcaaactgttcagtggcggtcatgcgtgacggtaaaccgcacttgctaaaaatggaaaacgacagcacgctgctgccttcaatgctttgcgcgccaacgcgtgaagcggtaagcgaatggctgtaccgccatcatgatgttccggcagacgacgatgaaacgcaggcgctgttgcgtcgggcgattcgttataaccgcgaagaagatatcgatgttacggcgaaaagcgtgcagttcggtctttcctcactggcacagtacattgatgatccagaagaagtgtggtttgtgaaatcaccaaaatcgttcctcggtgccagcggcttaaaaccgcagcaggtagcgctgtttgaggatctggtctgcgcaatgatgttgcacattcgccaacaggcgcaggctcaactgccggaggcaattactcaggcagtgattggtcgcccgatcaacttccaggggcttggcggcgatgaagcaaacgcccaggcgcaagggattctggaacgcgcggcgaagcgtgccggattcagggacgtggtattccagtacgagccggtcgcggctgggctggattacgaagccaccttgcaggaagaaaaacgggtgctggtggtggatatcggcggtggtacgactgactgttcattgctgctgatggggccgcagtggcgttcgcgtctcgatcgtgaagccagcctgctgggtcacagtggttgccgtattggcggtaacgatctggacatcgcactggcgtttaaaaacctgatgccgttactgggcatgggtggcgaaaccgaaaaaggcatcgccctgccgattctgccgtggtggaatgcggttgccatcaacgacgtacctgcgcagagtgatttctacagtagtgccaacggtcgtctgcttaacgatctggtacgcgatgcccgcgaaccggaaaaagtggccctgctacagaaagtctggcgtcagcgtttaagctatcgcctggtgcgtagcgcagaagagagcaaaattgctctttccagcactgcggaaacccgcgcctcactgccgtttattagcgatgaactggctacgctgattagccagcaagggctggaaagcgccctcagccagccactggcgcggattctggaacaggtgcaactggccctggataacgcccaggaaaaaccggacgttatatacctgaccggcggtagcgcccgttcgccgctgattaaaaaagcgctggcagaacagttgccgggcattccgattgcaggcggcgatgactttggctccgtcaccgccgggctggcacgctgggcggaagtggtgtttcgttaattgaaaaatggctcagcagcggcttaaatctgcctgcgcctgagccagtttttctgccgcctgacgtaacggttccatcaacggcatggtccgtgctggcgcatgaaggcggaatcgctgcaactctgtcgcgccgacagtcaacgtcgattccagccgatgtcgtttggcggccattttagtcattaccgcttgtctgtctgcaggcgttaccgcttcgttcggcctgaacacaaaacggcgttcacagctcgctttccagtcgataaccgcctgggtcagatggtcgccaaaccctttcacttgcttaacgccacgacgggtaacatctgctgctgtttcaataccaaaggaccgtaacgccgctttacgcgcagggccaacaccgggaatagaggcaacatcaataaaaaatctctccagaaacttctgtttctgccgttcccttgcagtgtcatgaagtgctgccagagcgcgtttctcttcttccggtaacccgagaattttgtccttcattttttcgagcatcgcccgtttggcgataaaaccttccagcccgcccaactgttggatctggttgactaaatggtcatagtccattttcgcgcgattaaatacctcacggcgttgctgaacttctgctttgtacgctttgcttgtcagactgccaataatccagatagccgccagcacaggaaccaaaataatataacgcggttctgcctgaaggccgcaaagcaacagcgataacgctgacagtgcgatctcaatcagaatgatgtattcgcgccgtaacaggcctaaaggaagcggcctgccagtcggttggaaatgatcgggtaatggcagttgcaatgctggcggcgctactgacgccatcaccatcgcccagactttcgccagcacaaaatcaccgctggtggtaatgacctcttcgccgagatcaataaaatagataacgccttgattatccagcgcacaccacgggcagtcagtcaaatgagcggggtaaacatgcattgctgaaacggtacatttctttaactgttggcgcagagaatcaagtgccgctacccacgctttagccgtcggacgcccggttgccacgccactttccgtgaatgcctgctgaaacatggcttcaacatcactcggtaacatcgatagcggaatcgatcgtggcggcggttttaaaccacgtcgctgattatctgacgcgtaggcataacggaaatgggtaatatccgtctccagcgcattacccgcatcagagataagcggcacaccagaataaggatgccggccaccaaacaagacgtgaaaaatcagcaacgcaaggccaaaattatcgtgattttctgtgcgttcaaagccgacaaatgacgacaaggtttgtagctctggcggcgtaaaatgcgacacgccgacttcgcataaatgcagtgtgccattggcgttaatctgaaaggagtcgctatcaatcagtaccactttgctgtcgcgacctaccataaaactgttctggtttacgtcacccacgacgtgcccgtgctcgtgaaccgtagcaaaagatgaagcaatattgcgcgcaacatagagtagaaaatcccacgcacaatgagggtgactctggcgacgatgtgccgggctatagatcatatgaatcggttctttaccagaaacttttggcatcataaaaccgataacttttccgcctcgtccaccgtgaagcgttgcctgcggccaggcgacataattcaacaactgcgcgtcagctgtcgcagccataaaggcaagtttgtcctgttttaaggcgggtggcggcgtgtgataaatcttggcgacgctatcgacaaactcctcgatatcataaaccgcgccttcaccacctttgcccagttcacggccaagagtggtcaattcacctgtcgatgtaaatacttttatatttgttttcataatatttcgcgggtagttatattatatttcaatgaataataacaactaaccattaaaattatttctatatggggaaaacccactcaagaataaaaatgataatgcaattttatcaggatacaattcaatttcggcctgataatgattaacttccacaggtttttgctaactttgactacaaagggattctggagaaaaaatgaaaaagatattacttatgttgagtctgctattttttactaccgcgggctttagtgaagtttcggatacgttagtgacgggaggttatgataaacaagcgatgtctgacgcgattaaacatgcgcggaaagaaaccgataaattcatcgaggttatgaataaaaaagatgccgatactttcgcagtcaaagccccgataaccgatcacggaagaaccgagcatttctggcttacggatgtcacttattctaacggcatgtttattggcgtaatcagcaatgaccctggtattgttacaaacgtagaatatggccaggagtggaaaatcaagaaagaagatatttcagactggatgtatacgcgcggggataaaatttacggcggttataccattgatcctttattggtcacctatccaaaagaagaagccgacgagctaagagcaaaattagttcgctaatcagccgttatatttattgtttaaactggcggttgaattgttgtcttcaaccgccatgagaaactcactctgcccacagcgccagtgccaacgttttatcatcatccgtacgctcgtttaccgccgggctggacaaaaactgctttaacaattcaggtaataaatcgagttgttcctgcgttgctgccgccagtccattgaaaaacggggtaaagaaaggcacatgtggagaattatccaacatatttaacgccagtcgctggataccatccgtaaatgctgcaactttatgcacacgctcagtgctggtgaaagtttccagtctggaaacggcatcttcatcggtaatgaagtgcgtcatattggcatattcacccaccatcggcgtaagcggcaattgcagaccgtgaccaaaatccaccaccacgccgccatcgccaatctgcataatcagggtgccattagctgatgaaatcaatcccataaacgtgcaggcaaaatcgcgaacagctaattctttggcttccgcctcggcaaaaagtcgttgacgaatggtcagcacaatatccgtggcgaggacatcattaagccccaattccccgccctgcactttttgcgacatataagccatcgcttcattgacggcgagcatcgcgccttcgccaccctgcgagacactgcctgcgccatcagcgacaaataccgacaataatggctgctggtcatttagccaggcaacctgcatctggcaggcatcctgacaaggtaaatcagcgctaatgtgcgacgttccaacaacggatgcataaaccagacgccaggtcacactgacgtccagccttttggcgcttccagtacaacttccgttcccggcgtggagcgggaaaccgaacgtaatgaactggataaccagctaaacagttcacggaattgtaatccctgcagtggcaaaggctgacgaacactgatttgtgccagcgtcttcatatccgccccctgaacaccaatggtaaagaaggcaaacttcttatcttcttccccccgaaacactttgttggctgcagcctgccactcattggttggtgcaccatcggtaatcaggaaaatccacgggcgataatacgaaataccatttgcacgatactcacgtttccgctcctctaccatatccagggctttggtaatggccgcacccattggtgtatcgccctgggcaaacaggatgggcggaaaaaaattagcggcgctggtaaagggttgttccacatgcaccgggccgaacgtcacaatgccgagttccactctttttaaagccagcggatcagcaagcagttcatcacgaaaggtaaccaatccggcgttaagttcattaataggtctaccgttcatagaaccagaaacatccagcagcaaaatgcaggggcaacgtggttccgggttactggcaaaatcgctggtggcaaacgtgatttgttcgctcataagaaatcctttcttagagaattatcgaggtccggtatcataccgactgcaataatgaaataagagcaaacgaagaaactttcagaattaggcccggcggcgcagaaaattttgctattcgcctcgcaagaacggagagccgtcgattgacactaagggcggagtgacataatttcaggagtgagggttagggagaggtttccccctccccctggtgttcttagtaagcctggaagctaatcactaagagtatcaccagtatgatgacgtgcttcatcataaccctttccttattaaaagccctcttctccgggagaggctttcccgtttcagcgtcccgctgaaatcatcggcttacctcctttcgccctgaatgcagtctatcgctaacgcgtgaataaaatagtttcctctgtgattattgcgtaacgactcgcaaagaatatttgctggcaggatcgcagactacaaagcctgcggattgacaatcttatcgtgaaggcatactttcaggagtgagggtagagcggggtttcccccgccctggtagtcttagtaagcggggaagcttatgactaagagcaccacgatgatgatccacttcatcatgaccctttccttatttatggccccttcctcgggaggggctttcccgtttcagcgtcccgctgaaatcgtcggcttacctcctttcgccatgcaagcagtctatcgctaacgcgtagataaaatagtttcatgtgttattactggatgcgtgctcgcaaatgtgcccgtcattcagacgattccagacagtgtttcataattcctccatttttctcccttattggctggctacactagtatcattccgcgaaacgtttcaggaagagaaactcttaacgatgaaaggcagttataaatcccgttgggtaatcgtaatcgtggtggttatcgccgccatcgccgcattctggttctggcaaggccgcaatgactcccggagtgcagccccaggggcgacgaaacaagcgcagcaatcgccagcgggtggtcgccgtggtatgcgttccggcccattagccccggttcaggcggcgaccgccgtagaacaggcagttccgcgttacctcaccgggcttggcaccattaccgccgctaatactgttacggtgcgcagccgcgtggacggtcaactgatggcgttacatttccaggaaggccagcaggtcaaagcaggcgatttactggcagaaattgaccccagccagttcaaagttgcattagcacaagcccagggccaactggcaaaagataaagccacgcttgctaacgcccgccgtgacctggcgcgttatcagcaactggcaaaaaccaatctcgtatcccgtcaggagctggatgcccaacaggcgctggtcagtgaaaccgaaggcaccattaaggctgatgaagcaagcgtcgccagcgcgcagctgcaactcgactggagccgcatcacctcaccagtcgatggtcgcgttggtctcaagcaggttgatgttggtaaccaaatctccagtggtgataccaccgggatcgtggtgatcacccagacgcatcctatcgatttgctctttaccctgccggaaagcgatatcgctaccgtcgtgcaggcgcagaaagccggaaaaccgctggtggtagaagcctgggatcgcaccaactcgaagaaattaagtgaaggcacgctgttaagcctcgataaccaaatcgatgccacaaccggtacgattaaagtgaaagcacgctttaataatcaggatgatgcgctgtttcccaatcagtttgttaacgcgcgcatgttagtcgacaccgaacaaaacgccgtagtgatcccatcagccgccctgcaaatgggcaatgaaggccattttgtctgggtgctgaatagtgaaaacaaggtcagcaaacatctggtgacgccgggcattcaggacagtcagaaagtggtgatccgtgcaggtatttctgcgggcgatcgcgtggtgacagacggcattgatcgcctgaccgaaggggcgaaagtggaagtggtggaagcccagagcgccaccactccggaagagaaagccaccagccgcgaatacgcgaaaaaaggagcacgctcctgatgcaggtgttacccccgagcagcacaggcggcccgtcgcgcctgtttattatgcgtcctgtcgccaccacgctgctgatggtggcgatcttactcgccgggattatcggttatcgcgccctgcccgtttcggcgctgccggaagtggactatccgaccattcaggtggtcacgctctacccaggtgccagcccggatgtcatgacctctgccgttaccgcgccgctcgaacgccagttcgggcagatgtctggcctgaaacagatgtcgtcgcaaagttccggcggtgcgtcagttatcactttgcagttccagctaacattaccgctcgatgtcgccgagcaggaagtgcaggccgcgattaacgctgcgaccaacttgttgccgagcgatctgcctaacccgccggtttacagcaaagtgaacccggcagatccgccgatcatgacgctcgccgtcacctcaaccgccatgccgatgacgcaagtggaagatatggtggaaacccgcgtcgcgcagaaaatctcgcagatttccggtgtcggcctggtgacgctttccggcgggcagcgtccggctgttcgcgtcaaacttaacgctcaggcgattgccgccctcggcctgaccagcgaaaccgtgcgcaccgccattaccggcgctaacgtcaactcggcaaaaggtagcctcgacggtccttcccgtgcggtcacgctttccgctaacgaccagatgcaatccgccgaagagtatcgccagctaatcatcgcctaccagaacggcgcgccgattcgtctgggcgatgtcgcaactgtagagcaaggtgcagaaaacagctggctcggcgcgtgggcgaacaaagaacaggccattgtgatgaatgttcagcgccagcccggtgctaacattatctccaccgccgacagcattcggcagatgctgccacagctcaccgagagtctgccgaaatcggtgaaggtgacagtgctttccgatcgcaccaccaatatccgcgcatccgtcgatgatactcagtttgaattgatgatggctatcgcgctggtagtcatgattatctacctgtttttgcgcaatattccggcgaccatcattcccggtgttgctgtaccgctgtcgttaatcggcactttcgcggttatggtgtttctcgatttttcaatcaataacctgacactgatggcgttaactatcgccaccggattcgtggtcgatgacgccatcgtggtgatcgaaaacatttcccgctatatcgaaaaaggcgaaaaaccgttggcggcggcgctcaagggcgcaggtgaaatcggctttaccattatctcgctgaccttctcactgattgcggtgttgatcccactgctgtttatgggcgatatcgtcgggcgactgttccgcgaatttgctattaccctggcggtagcgattttgatctcagcggtggtgtcgctgaccctgacaccgatgatgtgcgcgcggatgctcagctaggagtcgttgcgtaaacagaaccgcttctcccgtgcctcggaaaaaatgttcgacaggataatcgccgcctatggtcgtggactggcgaaagtgctgaatcatccgtggctgaccttaagcgtggcactcagcacgctgctgcttagcgtgctgctgtgggtgttcattccgaaaggtttcttcccggtacaggacaatggcattattcagggcactttgcaggcaccgcaatccagctcctttgccaatatggcccagcgacaacgccaggtcgcggacgtgattttgcaggatccggcagtgcaaagcctgacctcatttgttggcgttgatggcactaacccgtcgctgaatagtgcacgtttacaaatcaacctcaaaccgttggatgaacgtgatgatcgggtgcaaaaagtcatcgcccgtctgcaaacggcggtagataaagtgccgggcgtcgatctcttcctgcaaccaacgcaggatctgactattgatactcaggtcagccgcacccagtaccagtttaccttgcaggccacgtcactggatgcgctcagtacctgggtgccacagttgatggaaaaactccagcaactaccacagctttctgatgtctccagcgactggcaggacaaagggctggtggcgtatgtcaatgttgatcgcgacagcgccagccgtctggggatcagtatggcggatgtcgataacgccctgtacaacgcgtttggtcagcggctgatttccactatttatactcaggctaaccagtatcgcgtggtgctggaacacaacaccgaaaataccccaggcctcgcggcgctggataccattcgcctgaccagcagcgatggtggcgtggtgccgttaagctcaattgccaaaattgagcagcgttttgcgccgctctccatcaaccatctggatcagttcccggtaacgaccatctcctttaacgtgccggataactattcgctgggcgatgcggtgcaggcgattatggacaccgaaaagacgctgaatctgccggtggatatcaccacgcagttccagggcagcaccctcgccttccagtcggcgctgggcagcactgtctggctgattgtcgcggcggtggtggcgatgtatatcgtgctcggcattctgtacgagagctttattcacccgatcaccattctctcgacgctacccaccgcaggggttggcgcactgctggcgttgctgattgctggtagcgaactggatgtgattgcgattatcggcattattttgctgatcggtatcgtgaagaagaacgccatcatgatgatcgacttcgcgctggctgccgagcgcgagcaaggcatgtcgccgcgcgaggcaatctaccaggcttgtctgttgcgttttcgtccgatcctgatgaccactctggcggctctgcttggcgcgctgccgctgatgttgagtaccggggtcggcgcggaactgcgtcgtccgttaggtatcggcatggtcggcggtctgattgtcagccaggtgctgacgctgtttaccacgccggtgatttatttgctgttcgaccgcctggcattgtggaccaaaagccgctttgcccgtcatgaagaggaggcgtaagtgaagttttttgccctcttcatttaccgcccggtggcgacgattttactgtcggttgccattaccctgtgcggcatactgggcttccgtatgctgccggtcgccccgctgccgcaggtcgattttccggtgattatggtcagcgcctcgctgcccggtgcgtcaccagaaacaatggcgtcttccgttgccacgccgctggagcgctcacttgggcgcattgccggagtcagtgaaatgacctccagcagttcgctcggcagcacgcgtattattttgcagtttgattttgaccgggatatcaacggcgcggcgcgcgatgtgcaggcggcgatcaacgctgcacaaagtttgctgcccagcgggatgcccagccgtccgacctatcgcaaagctaacccgtcggatgcgccaattatgatcctcacgctgacatccgatacttattcgcagggtgaactgtacgattttgcctcgacgcagctggctccgacgatttcgcaaatcgacggtgttggtgatgtcgatgtcggcggcagctcactgcccgccgtacgcgtcgggctgaatccgcaggcgctgtttaatcagggcgtctcgctggacgacgtacgcactgccatcagcaatgccaacgtgcgtaaaccgcagggggcgctggaagatggcactcaccgctggcagatccagaccaatgatgagctaaaaaccgccgccgaatatcagccgctgattattcattacaacaacggcggcgcggttcgtctgggcgatgtggcgacagtgaccgactctgtacaggatgtacgtaacgccgggatgaccaatgccaaaccggctattttgctgatgatccgcaagctgccggaagccaatattatccagacggttgacagcatccgggcaaaattaccggagttgcaggaaaccattccggcggcgattgatctgcaaattgcccaggatcgctcccccaccattcgcgcctcgctggaagaagtcgagcaaatgctgattatctcggtggcgctggtgattctggtggtgtttttattcctgcgctcgggtcgcgccactattattcccgccgtttcggtgccggtttcgctgattggtacgtttgcggcgatgtacctgtgcggattcagtctcaataacctttcgttaatggcgctcaccatcgctactggtttcgtggtggatgacgccatcgtggtgctggaaaacattgcccgtcatctggaagcgggaatgaaaccgttgcaagccgcactgcaaggtactcgcgaagtcggttttacggtgctgtcgatgagtctgtcactggtggcggtgttcctgccgctgctgttgatgggcggattgccgggccgactgttacgcgagtttgccgtgacgctttctgtcgccattggtatttcgttgctggtttctctgacattaacgccaatgatgtgtggctggatgctgaaagccagcaagccgcgcgagcaaaagcgactgcgtggttttggtcgcatgttggtagccctgcaacaaggctacggcaagtcactgaaatgggtgctcaatcatacccgtctggtgggcgtggtgctgcttggcaccattgcgctgaatatctggctgtatatctcgatcccgaaaaccttcttcccggagcaggacactggcgtgttgatgggcgggattcaggcggatcagagtatttcgtttcaggcgatgcgcggtaagttgcaggatttcatgaaaattatccgtgacgatccggcagtggataatgtcaccggctttacaggcggttcgcgagtgaacagcgggatgatgtttatcaccctcaagccacgcgacgaacgcagcgaaacggcgcagcaaattatcgaccgtctgcgcgtaaaactggcgaaagaaccgggggcgaatctgttcctgatggcggtacaggatattcgcgttggtgggcgtcagtcgaacgccagctaccagtacacgttgttatccgacgacctggcggcactgcgcgaatgggagccgaaaatccgcaaaaaactggcgatattgccggaactggcggacgtgaactccgatcagcaggataacggcgcggagatgaatctggtttacgatcgcgacaccatggcacggctgggaatcgacgtacaggccgccaacagcctgttaaataacgcattcggtcagcggcaaatctcgaccatttaccagccgatgaaccagtataaagtggtgatggaagtggatccgcgctatacccaggacatcagcgcgctggaaaaaatgttcgtaatcaataacgaaggaaaagcgatcccgctgtcgtatttcgctaaatggcaaccggcgaatgccccactatcggtgaatcatcagggattatcggcggcctcgaccatttcgtttaacctgccgaccgggaaatcgctctcggacgccagtgcggcgatcgatcgcgcaatgacccagcttggtgtgccttcgacggtgcgcggtagttttgccggcacggcgcaggtgttccaggagacgatgaactcgcaggtgatcctgattatcgccgccatcgccacggtgtatatcgtgctgggtatcctttacgagagttacgtacatccgctgacgattctctccaccctgccctcggcgggcgttggagcgctgttggcgctggagctgttcaatgccccgttcagcctaatcgccctgatagggatcatgctattaatcggcatcgtgaagaaaaacgccattatgatggtcgattttgcgcttgaagcccaacggcacggtaacctgacgccgcaggaagctattttccaggcctgtctgctgcgttttcgcccgattatgatgactaccctggcggcgctgtttggtgcgctgccgctggtattgtcgggcggcgacggctcggagctgcggcaacccctggggatcaccattgtcggcggactggtaatgagccagctccttacgctgtataccacgccggtggtgtatctctttttcgaccgtctgcggctgcgtttttcgcgtaaacctaaacaaacggtaaccgagtaaatgacagatcttcccgacagcacccgttggcaattgtggattgtggctttcggcttctttatgcagtcgctggacaccaccatcgtaaacaccgcccttccctcaatggcgcaaagcctcggggaaagtccgttgcatatgcacatggtcattgtctcttatgtgctgaccgtggcggtgatgctgcccgccagcggctggctggcggacaaagtcggcgtgcgcaatattttctttaccgccatcgtgctgtttactctcggttcactgttttgcgcgctttccggcacgctgaacgaactgttgctggcacgcgcgttacagggcgttggcggcgcgatgatggtgccggtcggcagattgacggtgatgaaaatcgtaccgcgcgagcaatatatggcggcgatgacctttgtcacgttacccggtcaggtcggtccgctgctcggtccggcgctcggcggtctgctggtggagtacgcgtcgtggcactggatctttttgatcaacattccggtggggattatcggtgcgatcgccacattgctgttaatgccgaactacaccatgcagacgcggcgctttgatctctccggatttttattgctggcggttggcatggcggtattaaccctggcgctggacggcagtaaagttacaggtttatcgccgctggcgattgctggcctggtcgcagttggcgtggtggcactggtgctttatctgctgcacgccagaaataacaaccgtgccctgttcagtctgaaactgttccgtactcgtaccttttcgctgggcctggcggggagctttgccggacgtattggcagtggcatgttgccctttatgacaccggttttcctgcaaattggcctcggtttctcgccttttcatgccggactgatgatgatcccgatggtgctcggcagcatggggatgaagcgaattgtggtacaggtggtgaatcgctttggctatcgtcgggtactggtggcaaccacgcttggcctgtcgctggtcaccctgttgtttatgactaccgccctgctgggctggtactacgttttgccgttcgtcctgtttttacaagggatggtcaactcgacgcgtttctcctccatgaacaccctgacgctgaaagatctcccggacaatctggcgagcagcggcaacagcctgctgtcgatgattatgcaattgtcgatgagtatcggcgtcactatcgccgggctgttgctgggactttttggttcacagcatgtcagcgtcgacagcggcaccacacaaaccgtctttatctacacctggcttagcatggcgttgatcatcgcccttccggcgttcatctttgccagagtgccgaacgatacgcatcaaaatgtagctatttcgcggcgaaaaaggagcgcgcaatgaagttctggcgacccggtattaccggcaaactgtttctggcgattttcgccacctgcattgtcttgctgatcagtatgcactgggcggtgcgtatcagttttgagcgtggctttattgattacatcaagcatggtaatgaacagcgattacaactgttaagtgatgcgcttggcgagcagtatgcgcagcatggcaactggcgcttcctgcgcaacaatgatcgctttgtctttcagatcctgcgttcatttgaacacgataattcggaagataaacccggcccgggtatgccaccgcacggctggcgtacccagttctgggtggttgatcaaaacaacaaagtgctggttggtccgcgagcgccgattccacctgacggtacacggcgacccattctggtcaacggtgcggaagttggcgcggtgatcgcctcccccgttgagcggttaacgcgcaatactgatatcaatttcgataaacaacagcggcaaaccagctggttgattgtcgccctggcaacgttactcgcggcacttgccacttttctgctggcgcgcggtttactggcaccggtaaaacgacttgtcgatggcacgcacaaactggcggcgggcgatttcactacccgcgtaacgcccaccagtgaagatgaactgggcaaactggcgcaagacttcaaccagcttgccagcacactggagaaaaaccagcaaatgcggcgcgattttatggccgatatttctcacgaactgcgtacgccattagcggtgctgcgcggtgaactggaagccattcaggatggcgtgcgtaaattcacgccggagacggtggcgtctttacaggcggaggtcggtacactgaccaaactggttgacgatctccatcagttgtcgatgtctgatgaaggcgctctcgcctatcaaaaagcaccggtagatttgatcccactgctggaagtggcgggcggcgcatttcgcgaacgattcgccagtcgtggcctgaaactgcaattttccctgccagacagtattaccgtatttggcgatcgcgaccgtttaatgcagttattcaataacttactggaaaacagcctgcgctacactgacagcggcggcagcctgcaaatctctgccgggcagcgcgacaaaacggtgcgcctgacctttgccgacagtgcgccaggtgtcagtgacgatcagctacaaaaattgtttgaacgtttttatcgcaccgaaggttcccgcaaccgtgccagcggcggttccgggctggggctggcgatttgcctgaacattgttgaagcacataatggtcgcattattgctgcccattcgccttttggcggggtaagcattacagtagagttaccgctggaacgggatttacagagagaagtatgaccgagttaccaatcgacgaaaacacaccgcgtattttgatcgtggaagatgaaccgaagctggggcagttgctcattgattatctgcgtgctgcgagctatgcgccgacgcttatcagccacggcgatcaggtactgccgtatgtgcgccagacaccaccggatctgatcctgttagatctgatgctccctggcaccgatggcctgacgctgtgccgggaaattcgtcgtttttctgacattccgatcgtgatggtgacggcaaaaatcgaagagatcgatcgcctgctggggctggagattggcgcagatgattatatctgtaagccgtacagcccacgggaagtggtagcgcgcgtcaaaaccattttgcgccgttgcaaaccgcagcgcgagttgcagcaacaggatgctgaaagcccgttgattatcgacgaaggtcgttttcaggcttcatggcgcggtaaaatgcttgacctgacgcctgcggaatttcgtctgctgaaaacgctctctcatgaaccaggaaaagtgttctcccgcgagcatttgctcaatcatctttatgacgactaccgcgtagtaaccgaccgcaccatcgacagccacattaaaaacctgcgccgcaagctggaatctctcgacgccgaacagtcatttatccgcgccgtttacagcgtcggttaccgctgggaagccgacgcctgccgcatcgtttagttttagcgacattattttgttagccggagatggcgttcagacccgatccggcaacattatcccacgcatggtcagcaaactgacattatctctccgccctggcaggcatcagaaaatcgctcatactttaatcggtaaacagcacctttagatgctgttttcgatacacaatttcaatcaaggagtcattatggctggttggtttgaactcagtaagagcagtgataatcagttccggtttgtgctaaaagcgggcaatggtgagactatcctcaccagcgagctgtatacatcaaaagcctctgcggaaaagggcatcgcgtcggtgcgtagcaacagcccgcaagaagaacgctatgagaaaaaaacggcaagtaacggcaaattctatttcaatctgaaagccgctaatcatcaaattatcggctccagccagatgtacgccaccgcgcaatctcgtgaaaccggaattgcctccgttaaagccaatggcacaagccagacggtgaaagacaatacgtaattacgatgccgggcgtgggttgttggcgtccggctttatatccaaataacgcttagttattaataattaagagtaaccgccgccattaaaatagtgggcactgacgagcactcgttgtgctttctttgtttaccatcccatacttatcctcctgaacatgttcatgtgccaaaatatcttctaatactttcgtgacgctatccggtttatgacatacactgatgtaagatttttacttacaggcgggcgtaaaatggccagaacgatgacggttgatctcggcgatgagttgcgtgaatttatcgagtccttaattgaatccggcgactatcgcacccaaagcgaagtgatccgtgagtcactgcgattacttcgagaaaagcaagcagagtctcgcctgcaagcgttacgtgacatgctcgcagaagggttgagtagtggtgaagctcagccgtgggaaaaggacgcgttcttacggaaggtgaaagcagggataaggaaataatgtgcgtattattaaactcatgccaaaagccaatgaggatttagaaggcatctggtattacagctatcaccatttcggcgaaccacaagccgacagatatgtggaacatctttcagacgttctccagattctgagtaacaataatataggtacgcccagacctgaattaggcgaaggtatttttgttcttccttttgaacgccacgtcatttatttcctgcaatcaccaggggaaattatcgtcattcgtatccttaaccaaaaccaggacgccaccagacatttacactggagctaaacccgccgattgcgctacaatgcccgcccttaaagtgggggcactcccctaaccgcttcatcaggtgaagcggatctgacctgtcatcagaacgagagaattatgtttaaaccggaactcctttccccggcgggaacgctgaaaaatatgcgttacgctttcgcttatggcgcagatgctgtttatgcgggccagccgcgttattccctgcgtgtgcgcaacaacgaattcaaccacgaaaatcttcagctcggcatcaatgaagcccacgcgctggggaaaaagttttatgtcgtggtcaacattgcaccgcacaacgccaagctgaaaacctttatccgtgacctgaaaccggtggtggaaatggggccggatgcgctgattatgtccgatccagggctgattatgctggtgcgtgagcacttccctgaaatgccgatccacctttcggtgcaggctaacgccgtgaactgggcgacggtgaaattctggcagcaaatgggcctgacccgcgtgatcctctctcgcgagctgtcgctggaagagattgaagagatccgcaatcaggtgccggatatggagatcgagatcttcgttcacggcgcgctgtgcatggcctactccggtcgctgcctgctctctggctatatcaacaagcgcgacccgaaccagggcacctgcaccaacgcctgccgctgggagtacaacgtccaggaagggaaagaagatgatgttggcaacatcgtacacaagtacgagccgattccggtgcaaaatgttgagccgacgctgggtatcggcgcaccaaccgacaaagtgtttatgatcgaagaggcccagcgtccgggcgagtatatgaccgcgtttgaagatgagcacggcacttacatcatgaactcgaaagatctgcgcgccatcgcccatgtagaacgcctgaccaaaatgggcgtgcattcgctgaaaatcgaaggtcgtaccaaatctttctactattgtgcacgcaccgcacaggtttaccgcaaagctatcgatgacgccgctgcgggaaaaccgttcgataccagcctgctggaaactctggaaggtctggcgcatcgtggctataccgaaggtttcctgcgtcgtcatactcacgacgattatcagaactacgaatacggttattcagtttctgaccgccagcagtttgttggtgagtttaccggtgagcgcaagggggacctcgcggcggtagcggtgaaaaataaattctccgttggcgacagccttgagctgatgacgccgcaaggcaacattaattttacccttgagcacatggaaaacgccaaaggcgaagctatgccgatagcaccaggcgatggttatactgtgtggctcccggtcccgcaggatcttgagctcaattacgcgctgctgatgcgtaatttctccggggaaaccacgcgtaatccccacggtaagtgattaatttcgattatttttcccggatggaaaattcttagaaaccgatcacatacagctgcatttattaaggttatcatccgtttcgctgaaaaacataacccataaaatgctagctgtaccaggaaccacctccttagcctgtgtaatctcccttacacgggcttattttttatgcataagccctatccctggtcaccgtcttccattgaccacatcgatagaatctcccttcatagcacgatgcctttcacgtaacggcatcgtgctcgcacaggttccggctaagcacaaccagaacgcgcatgtttgatgcttaccaaaaaatattctcactctccacatttgaatgtcagacgagcgacgccatgtaatcctgcaccttctgtcttcaggtcaactatctgcatttttttgccctgagtaacacagaaatgggctgcatcattttttactatattttctgcaccagatattctacccctggctaaagaagcttcggcttcggtgtagtattggttatcgagtttacgctgaatattacttttatatgcaagaccaaatttaccgatacttgtttcatcattatgcacagcacaaccagatataagaaaaatactaattaatgatatagcagctatctttttcatctcaccttcccccattaaataccaacgacactctctagtgtttaaatataataatggcatgattattataattgaataggattataataaatgttctgtacaacatttcctacataagtaggaattacggacattgaggcccttcagggtaactccatgggggctttaatatattatattgaagatgccactgtttagttgaatattaggtatatgctcttttttgaaatttatcggtggcagccgttagtattcgctgtccccattgcaagctcctggtggtaaccactgaatcctccatacttgaactgactttttatcctccgactttcatcctgttctgactccaccttttgttttctgctctacactatctacagaccaatcataaaggcacatacgatcatggcagaatttcccgccagcttactgattcttaatggcaaaagtactgacaatctacccttgcgcgaagcaattatgctgttgcgtgaggaaggaatgacgatccatgtgcgggtcacctgggagaaaggcgatgccgcacgatatgtagaggaggcccggaagttggacgtcgcaacggtgattgccggtggtggcgatggcaccattaatgaagtttctacagcgttgattcagtgtgagggggatggcatacccgcgctgggaattttgccattaggaaccgccaatgattttgccaccagtgtagggattcctgaggcactggataaggcgctgaaactggcaattgccggtaacgccattgcgatagatatggcgcaggtcaacaaacaaacctgttttattaatatggcgacaggcggatttgggacgcgtattaccacagaaacgccggaaaaattaaaagccgcgctgggtggcgtctcttacatcattcatggcttaatgcgcatggatactctgcaaccggaccgttgtgaaatccgcggtgaaaactttcactggcaaggtgacgccctggtcattggtattggtaacgggcgtcaggccggtggcggtcagcaattgtgtccgaacgcgttaattaacgatggcttgctgcaactgcgcatttttaccggcgatgaaattcttccggctctcgtatcaaccttaaaatctgacgaagataacccgaatattatcgaaggcgcttcgtcgtggtttgatatacaagccccacacgaaatcacttttaatcttgatggcgaaccgttgagcggacaaaactttcatattgaaatacttccggcggcgttgcgttgtcgattaccaccagattgtccattattgcgttaatcaaactattctctcttgaaccagggagaatccgaaatgccggatgcggtgtaaataccttatccggcatacagaacaatactacaccgtaattaattttacccgtgtcttctgcaatgccagtttatccacctctgatacagcatcatcggtaataataatgtcaattttttcgattggcagtacctgattaaaaccgcgacgattaaatttcgatgaatcgagaacggcaatcactttattagcggcggtgaccatcgcaccgctaatcgaataaccttcattaaaggtcgtaataccattaaccgcatcaataccatcagcaccgacaaacattaaatcggcattaatatcctgcagggaacgttcagcaatagatccatgcatagatcgcgttttatggcggaccgtgccaccgcagacgaccagagtaatgtctttattttcggaaagggcaaacgcagccgggagactgttggtaatcaccgtgatatttttggcggtcattaatccttcggcgataagcattgtggtacttccgctgtcgagaataacggtcatcccttcatggatcattttgactgccgcctgcgctattctgtttttcggcgcgctggcgagctgaaatcgctctttaaacccgacttcctgggtctcggtttcactattaccggacattattttcgccgcaccgccatgaaagcgcgtaaccacgcctttttgttcgagaaagcgcaaatcggcacggattgtcgcttccgaggcagcaaatactcccgccagatcctgaacaagcacggttccctgttcattcactaattggatgatcttattccttcgctcgaatgaattcatcgtcatttacccatattcaattgtggctagtgtaaacgaagggggaccattggtgaatgatctgttttgcacaataccgggccagcatcacgctggcccgcggtttcagggaatgagcaacactttgcccggcatggcattacgagcgatgtcacgcaccgcctgggcgaagctttcaaagcttccacggtgagcgattaatggctccaggcttaacttacgttctgtcagcaaccggctcgccgtttcccactcctgccccggccaagggctggagtagttcatccaactgccgataaccgtcagctctttacgcaatattttgccaaacgttgccgatgttaaatgcagatcctgatgcaacgtgcccaccagcgccagttgggcatgaggaccggcaatctctaccgccagttcgacagtttgcggtacgccagccgtctcgaggataagctgattaaagcgcagttcgcgtaaaacgctctgcatttgcggcgcgctcatttcgctactgttaaatgtttgcatcgcaccgaaagattttgccagtgccagtttttctgagctaatgtcgatagccgtcacactctttgctcccagcgcgacagcgcactgaatagccagcaggccaatggttccggcaccaataataataacgtttttattctcacaaccttgcgctaaatgaaaagcatgcagtccaacggtaatcggctcaataaaagccccatcctcaataggcatatccgtgggtagagcaaagacattttttcgcttaacgacaatatattcagcaaatccaccatcacgccgcgagccaataaaatcatattttgcgcactgggaataaaaccctttcaaacactctggacaagtaaaacagggtaataacggcacacaggcaaccgcatcgccagggtgtaaatcatcaacaccggatcccaccgcatcaatatagccgctaaattcatggcctaacgttattggataataatgtgcaccatttttaaatatcctgggtaaatcggaaccacataagcccgagctggcaatttttacccgtacctcatcctgatgtttaatttcaggaatgacgctttctgcaacgcgcacgataccatcagtatcattcaccactgatttcataaaaactcctgattgttaagggggataaactccccctcagttaaaaattattctgcgagaacggctttctcttgtttaataaaaccacgcgctctacgccaggtaatgaaaataccggtcagataaattgcgccgataataatgaaaccgggaatattttgcggggagaaaacctgaatcagtaaccaggtaatgggagaaccgccctgatccattgaagccaccatacccccggcttttaacgccccagcattagccgccagttgggtgtgcaaaccaatagtttgcgtcgcgatccacagagtgatgctcatgatgatgacacccgagattaaggtgcggaacagatttccacgatgcacggcgactgccatcgccacaaagaagccgatggtggcaagatcgccaaacggcagcacctgattacccggaacacaaacagcaattaaaatggtgagcgggataaaaatcaggcttgccgataccaccgccgtatgccccagcagtaatgcgggatccaggccaatcaggaactcctgaccgccgaacttcgcctgtaaacgactacgggcctgcttagcgatgggcgttaaaccatccatgatgggtttaatcacccgtggcattagcagcatcactgccgccgtttttaccgccagctgcaatacacctttgacatcgtaacccgcgaggatgccgataatcagccccatcacaaaacccacggtgacaggctcgccaaatggaccaaatttgcgctgaatatcgtcggcgctaaatttaattcggttaacgcctgggattttctcgatgatagcatcgaccagcaccgcaatcggccccatatacgccgacgtaccgtgcggaatagcaataccttccagctcaaagaaatttcgggtatcgcgggcaaaccagtcgccgagcttataaacaaacgccgcgtgaattaccacacctgccatccctatcatccatgaaccggttgccagatgcagcaacgcgccggtgaaggtcatatgccagatattccagatatcaacatttaccacccgcgtcatacgggtcagtaacatcgccacgttaaccagaatcgcaatcggaatcgccaccagcgcaatttgcgacgcccaggtcattggtgaagagcccggccagccgacatcgaccacatgcagattcaggtcgaaattttccgccatcgctttcgccgccggaccaatggaatccagcattaagccaatcacaaggccaatgccaacaaagccaatcccgatatgcagacccgctttaaagcaatcgcctgccttcatgcctaatattttagaaaaaataatgatgacaatcggaagcatcaccgtagggccgaggtcgagaatataacgcatgacttctgaaaacataggtcacccctgtaagatagtcagaattttattttgtaatgcttcgataccgacaccagaaataaaaggcatgccgtgaactaacggaatatcgccaaaactacgatccactttggcagtggtgcatatcaaatgcacaccatccatataggtttctatttcattaacccgacactggattaattcaacaggaatattatgattctgacacaactctttaatttcttccgccgccatcgtagaggtcgcaaccgcgcctccgcaagcgacaataatcttgcgtttcataaatagtcctttttattgttacagagggatttattcttctgaatctaaaacatactttgtgaagtattcctttaactgggtttcaggaagagtgattagtgtctcgacgatatcgggctgttgtaacttgccaaataaacagcgtaaaagtttcaattgctgctgcggattttccacaatcaacgcaataaccaacgatacctccacgtcgttatcatcatccgcttgctgaaaatgaactttatttgttggccttaacagataaatggctgacgacttagcatgaatcgcctcacaatgcggtattgcaatggcgtgctgctcaagcattatcccggtagggaattctgcttctctggcaattaatgcctgtggccaggtatcatgaaccacatctttggcgagcatctcattaccgatatgggttaaaacttcgctacgatcgacaaaagaaattccgctacgaacaaacaggttagtcatataccgtccttattccgcacagccgtagcgataggcgcgcaaaacatcataaattttatccataatcagctgatgcggtattgctgataattccccggactgaatgcgttcaaattgtttgggaagatactgactaatcatgcccagtgggatgtccacgccttcaagattcaccatcatcgtttcgacgctatttttaatccgactatgcggccagtaataacgaatacgatccgacaggctgtaacgaatatccagtaatgaatcgttaaaacccgtacgataatattttttccagtattgcggttcgtcgagcatcacttcttcaattaccgccaggcaaccgctgcgattttcgggggcgataagttcctgctcaatttgtgccagtgcaaatatcgcctcgcgtaaagcaaaggttaatgcgggaccgactttcaatattgcaaagtgatcgcggactaattcccaataagccgtccgggtctggtaatcggtagaatgtgcttcataaaccattcgggtgttttctatccattgcgccagcgcctgcgcttcctgcggctgataatggataatattgctgtgatcaaattccacacccggctgcaccacgatggcaatcacacgtgttaacgcctctgtcagcccacgggcaataaaggccttttgatgcgtacgtaaagtattggcggcatcttcaacatgggtgatgtgtactgactgaatggcgctggcctcaccgcccggaaccggaacttcggtgccaatgacatagctcagttgctcacgctggcaatctgtcgccacactttccgcagcaaagcaaagcacagcagctcgttccgcaaccgtttctggtgctaacggtatgggatcccccgcgcaggacattgacgcatcaagatgaattttactgaagccagcacgaacatatgcttttaccagctcgacggatttttccatcgccgcatccgcattttcttgctgccagcagtttggccccagatgatcgccgccgagaataatgcgttcgcgtgcaaacccaactttatcggcaatcgtaaaaacaaattcgcgaaagtctgccggtgtcattccggtataaccgcccaattgattgacctggtttgacgttgcttcaatcagcactttgcgcgtgctgttgcgatcaaatgccagcgccgcttcgataaccaacggatgggcagaacagactgaacatatgccgatatgttcaccagctttatgccgggcaattaacgttttcatgttttttccttgttaaatggcaggtgcgttatgccctgccctcgcagccacaatcggcaatcactttgctcaccacatcgcgcattgcggatttagccgactgcaaataatcccggggatcggtcgcttcggggtgctcggtcaggtaattttttaacgcctgcgagaaggcatttttcagctccgttgcaacgttgattttgcatatccccagtttgatggtttgctgaatatccttagtcgataatcctgacgcgccatgcagcaccagcggtaagttcacccactggcgaatgttctccagtcgagaaaaatcaagcgccggtgcgctggcatacataccatgagccgtgccgatggcgaccgccagggaatcaattccggttgcctcggcaaattcacgcgcctgagcggggttggtataaaaagcatcggcttcattgacttgcacatcatcttcctggccgccaagttgccccagctccgcttcgacgctgacatcaaagcgatggcaaaaatccaccacctctttgacccgtgaaatattttgcgcaaaaggcaaatgcgaggcgtcaatcatgactgagcgcacgccagaacgaaccttctgagcgatatcgtcaaatttcgtgtgatggtcgagatgaattgccagtggatggtgatattgcttcgccatcgcgctgaccagcgccaacagattttctgtaccagcatgagtaaatgtgccaggcgttccggcgatgatgaccggcgcatgcaggttggcagcggtttccaccaccacttgcatcgtttcgagattgtgaatattgaatgctggaaccgcataaccgccgcgctgtgcgttgttcagcatctgctttgtcgataccacgtacattttcatatcctgtcgtttgttttcgatttcaaaatataatgaaattatttgtttttaaatatcgagataacgatcacaaaacgacaatatgaaaattgttcgaggagtgaaaggcaaaaaaacggcctcccgatagggaagccgtagcaaagtgcgcgtgtttttatgccggatgcggtgtaaacatacgtggcagtgctatgtaggcatgataagacgcttccgcgtcgcatcaggcataggttgccggatgcagtgtaaacgccttatccgtcctacggggtggtgttgttcgtataaggcgtatcaggcaatagtaattttgctatcgagataaacgtcctgcacggcgttaatcagtttcacgccgtcagccatcgatttcttgaacgccttacgtccaagaatcagccccattccgccagcgcgtttgttgataaccgcagtacgcactgcatcactgaggtcagtttcaccgcctgcagcaccgccggagtttatcaacccagcccggcccatatagcagttagctaactgataacgcaccagatcaatcgggttttcgctggttaacttgctgtacacgcgatcgtcggtataaccgtaattaatcgctttataaccgccgttattttccgccattttctgtttgacgatgtccgcgccaatggtcgccgccagatggttcgcctgaccagtcaggtcggcggaaacatggtaatcaacgccatctttcttaaaggcggagttacgcaaataggcccacagcactgtcaccatgcccagctcgtgcgcacgttcaaaagccgcagaaatttcttcaatctggcgacgtgactcttccgagccaaaatagatagtcgcaccaaccgcaaccgcgcccatgttgaacgcctgctccacgctggcatacagcgtttgatcgtaggtattcgggtaacttagcgtctcgttgtgattaagtttgacgaggaatggaatgcgatgcgcataacgccgcgataccgacgccagcacgccgtaagttgacgccacacagttacagcccgcttcgatcgccagttcaacaatgtttttcgggtcaaagtagagcgggttagcagcaaatgaagctccggcagagtgctcaacgccctggtcaaccggcagaatagaaagatatcctgtgccagccagacgcccggtgttgtacaacgtctgcatattacgtaacaccgcaggcgggcgattattgtcaatcatcacgcggtctacgtagtcatgtccggggagataaagctggtcagaaggaatagtcatacaacggtgctgtaaaaggttgtcggcgtctttgccaagcaactgcgcaatatctgtcattactatgctcccgtaaattccgattggatatcggctatggattttcctggcccgccttttgcgggcaatcataatcctggtcgttacgggcgagtttttccatcttttggatgttttttcagcgttttctgttggctcgattcatcagaaaaaatgttagcgcggtcaagttttcaccgcaaaggtatttaaaaggtattattaagtggtattgtcatcgcgtaccttacattacctgtcatgaaggaattaaaagatgaaaacaacagcaaagctgtcgttcatgatgtttgttgaatggtttatctggggcgcgtggtttgtgccattgtggttatggttaagtaaaagcggttttagtgccggagaaattggctggtcgtatgcctgtaccgccattgcggcgatcctgtcgccaattctggttggctccatcactgaccgctttttctcggcgcagaaagtgctggcggtattgatgttcgcaggcgcgctgctgatgtatttcgctgcgcaacagaccacttttgccgggttcttcccgttactgctggcctactcgctaacctatatgccgaccattgcgctgactaacagcatcgcttttgccaacgtgccggatgttgagcgtgatttcccgcgcattcgtgtgatgggcactatcggctggattgcctccggtctggcatgtggtttcttgccgcaaatactggggtatgccgatatctcaccgactaacatcccgctgctgattaccgccggaagttctgctctgctcggtgtgtttgcgtttttcctgcccgacacgccaccaaaaagcaccggcaaaatggatattaaagtcatgctcggcctggatgcgctgatcctgctgcgcgataaaaacttcctcgtctttttcttctgttcattcctgtttgcgatgccactggcgttctattacatctttgccaacggttatctgaccgaagttggcatgaaaaacgccaccggctggatgacgctcggccagttctctgaaatcttctttatgctggcattgccgtttttcactaaacgctttggtatcaaaaaggtattattgcttggtctggtcaccgctgcgatccgctatggcttctttatttacggtagtgcggatgaatatttcacctacgcgttactgttcctcggtattttgcttcacggcgtaagttacgatttttactacgttaccgcttacatctatgtcgataaaaaagcccccgtgcatatgcgtaccgctgcgcaggggctgatcacgctctgctgccagggcttcggcagtttgctcggctatcgtcttggcggtgtgatgatggaaaagatgttcgcttatcaggaaccggtaaacggactgactttcaactggtccgggatgtggactttcggcgcggtgatgattgccattatcgccgtgctgttcatgatttttttccgcgaatccgacaacgaaattacggctatcaaggtcgatgatcgcgatattgcgttgacacaaggggaagttaaatgaaaacagaacgtattctcggtgctctttatgggcaggcgttaggggatgcgatggggatgccctccgagctttggccacgcagccgcgttaaagcacactttggctggattgaccgttttcttcctggaccaaaggagaataacgcggcctgttattttaaccgcgccgaattcaccgacgatacctcgatggcgctgtgtctggcggatgcgttactggaacgtgaaggcaagatcgatccggatctgattgggcgtaatattctcgactgggcgctgcgtttcgacgcctttaacaaaaacgtactaggtccgacctcgaagattgcgcttaacgccattcgcgacggtaaacccgttgctgaactggaaaacaacggcgtgaccaacggcgcagcgatgcgcgtctcgccattaggttgtttgcttccggcgcgtgatgttgattcctttattgatgatgtagcgctggcgtccagcccgacccataaatccgatctggcggttgcaggcgcggtagtcatcgcatgggcgatttctcgtgccattgacggagaaagctggtcagcgattgttgattccctgccttcaattgcgcgacatgcacagcaaaaacgcatcactacgttcagcgcctcactggcggcgcggctggagattgcgctgaaaattgtgcgcaatgccgacggcaccgaatccgccagcgaacagctttaccaggtcgttggcgcaggtaccagcactattgagtccgttccgtgcgccattgcgctggttgaactggcacaaaccgacccgaatcgctgcgccgtcctgtgcgctaaccttggcggcgacacagacaccatcggtgctatggcgacggcaatttgcggcgcgttgcatggcgttaacgctatcgatcctgcgttaaaggcggaactggatgcggtaaatcagcttgatttcaaccgctatgccacagcgctggcgaaatatcgtcaacaacgggaggcggtatgagcggcgctcgattacacacgctgctgcctgaattaaccacgcgtcagccggtgatggtcgtcggcgcggcggtcattgacgtgatcgccgacgcttatgccctcccctggcgtgggtgcgatatcgaactgaaacagcagagcgttaacgttggcggctgcgcactgaatattgccgtggcgttaaagcgcctcggcatcgaagcgggtaatgccttgccgctcggtcagggcgtgtgggcggagattattcgcaaccggatggcaaaagagggcttaatcagcctgatcgataacgccgaaggtgataacggctggtgtctggcgctggttgagccggatggcgaacgcacttttatgtcattcagcggtgtggaaaatcagtggaatcgccagtggctggcgcgattaaccgttgcgcctggcagcctgctctatttttccggttatcaactggcctcgccctgcggcgaattgttagtggaatggctggaagagctgcaagacgtgacgccgtttatcgattttggcccacgtattggcgatatcccggatgcattactggcgcggatcatggcctgtcgacctttagtgtcgctcaatcgtcaagaggctgagattgccgccgaacgttttgctttatccgcagagataacaacacttggcaagcaatggcaggagaaatttgccgcgccgttgatcgttcgtctcgataaagaaggcgcatggtatttcagcaacgacgcttctggctgcattccggcatttccaacgcaagttgtcgacaccattggggcgggcgacagtcatgccggtggcgtacttgccgggctggcctctggtctgccactggcggatgccgtattactgggcaatgcagtggcgtcgtgggttgtcgggcatcggggcggtgattgtgcgccaacgcgcgaggaactactcctcgcacacaaaaacgtatagatcgctgcgacagtggctaatgctgtactcaataggccgttgctgttggtcaagcgccacttgcttgatcaccagcaccggtattttgctatctaactgaatatgtgactgaaactcggcatccggcatccgggcgctaacgcgggaacgcgtacgttgtgggtaaatgtgctggctgcggaaatagtcataaagtgaaatcccgatggcatcaacatcatgaattaaatgcgccggaacccacgattcctcaatcgataccgcttcttcatcgacatagcgaatacgcttaagcaaaaagacatcacttcccgcttcgaccgccagctgctgcgcgacttcttcgggacatttcacgacacgcttgttaacccatagcgtatcgggctttttcccgcgcaataccacctgctgagaaaaacctcgcgcttctttcaacgagtattcgaagatgttgttgatctgcgtgccgtaaccacgcgaacgcgtcaccacgccctcttcttccagcgcctgcatcgccttgcgcaccgtaatgcgcgaaacgccggttaactgacttaaatcacgctcaccgggcaaaatattgccatgctccagcaccccgctgcgcacggcattttttaccgtttcggcaaacttaatataaagcggcgtgttatccgccgctaaaatacgctcgttcagttgggcaatcagctgggtatgcgcttgttccatttgtctttttcctgccagggagtctggtgggagtatatcactgcttcttatttaaggcgtttctttaatcccatcaacgaatgcctgcaactcctccaccgtgccattaaacacattaaaatccaccggaccattgatgccatctacctgtccacggtcggaatgctgccagaagcgccaggacatgccgtcattgtccggacgacgttgatagtagtgagccacccaccacggatattcattgaaatagcccgccagattcgtgtgataaaaaacggctcctgagtaaataatcggctttttccccgtacttttttcgaccatttttagccactgacttaccctcttgcgtaattcttttgccgataattttccccgttcttctacgtccagcacggcagggaaatcgccttgtgagaaatccaccgtttgcagaaataatcgcgcctgaacaggcgctgctaccgacggggagaaataatgatacgccccgcgcagcaggccattttcgcggcttagttgccagttacgcgaaaaataggggtccaccagcttttcgccttccgtcgccttaataaaagcaaactgtaagcggataccgttgtcgcgcatttttgccacccgctgccagtcgatccgctcctgccagcgcgaaacatctattccgtgaatggtgtaactggcaggaatgcgaatagcgaaagatttaaccgggcgataaccgtagaagtggatgtagtctttaatctgaactgctgtcgaatagaaaaaattcaccgtctgacgtggacaaattgcaacgatggaaattagcccaagagcgcataataaagcggtgaatttttttcgactggtgattctcagctgcattggtttcatccctgaatgtcagtgccaaaggctgacaataaccaaagcagctatagtacggtgctcaccaccaggcgtggaagtggtgaaccggaccaataccgtgaccaacttccagcgtgtcggcctgggctaatgctgatgaaagccagctttttgcctcctgtacggtgtcagcccagtttgtatggcgcgggcgtagtgcagccaacgccgcagagagcgtacaaccagtgccgtgggtgtttttggtcataatgcgcggtgcggtaaaccgttgttcaccctcgcgggtaaacagccagtccgggctttgctcatcatccagatgaccacctttcattagcactgcgccacagcccatcgccaacagcgatcgcccttgttccagcatttcctgttcggtgcgcgcgtgtggcgcgtcgagcaaggcagcagcttcgggcaagtttggcgttattaatgaaacctgtggcaataatcgactgcgcaacgtagcaaccgccgaaggtgaaagcagcgggtcgccgctttttgccagcataacggtgtcgagtaccacgttttggatctgataacgttgcaaccgttctgccaccgcttcaacaatatcggtttccgccaacataccgattttagtggtgtcgattcgcacatcgctgaacaccgaatcgagctgggcagcgacaaaatcaggctcaatgcgatacaccgactgtacgccacgggtgttttgcgccaccagagcagtaataactgagcaaccataagcgccaagtgccgagaaggttttaagatcggcctgaatccccgcaccaccactcggatcagtaccggcaatcgtcagagcgttaattcgtttcatgcctgcacctccggcgtcaattgccagagcgcatcaaggaaatgtggaacaaaactgcctggcccctcgcttctggcgactgcgcgttctccggcttgtttcatccagtgacaggcagatgcgacattttccagcatatcgcctggtaacgcacagcaggcagcgacaactgccgataatgcacagccagttcctaccactttggccattaacggatcgccgccgtgaatgccaacggtgcgacgaccatcggtaacataatccacctcgccagtgaccacgacgattgcgccagtttcccgtgccagtgtttgtgcagcgggtatcgcgttagctgcggcgtcagtggtatccactccccgtccaccattagcaacgccagctaatgccatgatttccgaagcattaccacgtatcgctgccggtttaaaagataaaagttcatgacaaaaatggcggcgataatcgagcgcaccaaccgctactggatcaagcgtccagggtgtttgagagctttttgcttgctcaacggcagcacgcatcgcctgtgcgcgtggctgcgtcagtgtgccaacgttaatcaacaaggcactggcgatagccgcaaactgactggcctcttcggtttcgataaccatcgctggcgatgcaccgatcgccagcaaggtattggcagtaaaggtttgcaccacatcgttggtcatgcaatgcacaagaggggaatgttggtgaaaaaggtgtaacgtgtgcgcagattgcgcggaactcagcaggtcgacttgcatagtttgctcctgccataacgtgaagaagcaatgacctggtggtccgtgacttccctacgctggcattatccagatcaggtgatacgggtatttcttactgatttttgttatcagttgataattaataagtttttcagcaaacaagaattaaaaacttcaaaactgaccacacaactgaccacacattttgttgaagctctacgaacaaagacgaacaataacaaacaaaagggaaatttgctggcagttttgcttaaccgttatcatttttcggctatccgttatcaagctggtggatgatcacggataacccgttatgggaatccccatatcggcatcatgcccaccagcatgaagtatttttcgcggatgtaaaaatttgacggggcgggcggtcccataagcaatgggggggtagggattccgctcccccccctcccgaatgcaatttttcttatatatatacaaaacagtgcgggttatgcgggttagcgggttatcttcgcgtgctaagtattttttattctttaatatcaatgcgttaaaaaatgatatgtttgaatattagccaaaacgtaacccgcaagacattcaaaataacccgcaaataccccccaaataacccacaaccccatcaggaaaatggggccagtgatgccaccgaacggctgaatctggtaacgttctgttgcctggttgcagtttgcgggtcagcaatactgacgcacaaagttagccgtatgtggctgtgcgtccaccagctacgccggaatggggtattccgtttcaacggaacaggtatgacgaatatgatcgcaccttctcccgaaaacgggtttgcctgtttcgggaaaacgggcacatgaagctgcatagacattttcactattcaggatctggcgggggagtttctcaatttccaccgttggtggaaattaaacgaatacagcgagttaggacaaggtgactaatggtcactctgttgctgcgtcaccatattgatgatccagccctgtagtcgcgccacttttccaccaatggtggaaaagcccacagcaggccgcccagcctcccccaatgggggattgtggaagaatcaacgggttaggccttaatcatctgcgtaatcataagtaatcataatgttcattcatccagcgcaattttgcgttatcgggaatatcagcaagttaccgccgcaaccgctccggcttcttccagtggtaagttattttttccttctcccggtacatctccacgcggcgacgatatgacaacaactccagaactctgatccgtatgtcgcgcatatccacgccgttaagctcaataccgtcacggcgcatcacctcagccaccacacgcgcgtaattttcggctatcacgctgtccggctgcgtggcctcctgtttgcctgcttcctggctgattccggtaatgcggcggattatttttagtagttcggtttcgctcactctcgttataccccatcaaacgccgcaagccgctctttgtggctgtcgctcatatcgaatgcaaattcctcatgttctgcctggaatgtgccaaacgccatcagcgccgcaacgctcgggtctatcttgttggatgattttttcttgttcggcttgatattggcgttcgcgtcactctgcatcacaacattactcattgaccaggccagcaccggatcgccacgatgcacaatcaccttccggttaacaaaaacttcgaacgatttcgccgccggactgaaacgaaggtatgtttgcgggaacggctccacctcaaatcctgccccctgtagctgcgtcctcaggtgcgtggcgttccatgtatcgaagcccaccagcctgatattgaaattctctgcatccgccatgatgtcatcacggatacggtcataatcaatgcagtcacccggtgttgtgcgtatccagcccgcctttacccactggcgatagatggcgcggtttttattggcggggttctgtagctgaaactccggcagatagtgacgggaaaccagcataatctttttaccgaccggaaaggcatagcacacgctggaaatatcgctggttgatgataagtccagccccgcgtagcactcctgcccgtataaatccgcctccgcgaacgttccggcgcactccgcccatgcaccgttacccatccacggcgtggccccctgacaccagatattgaatcgcttggtgagcatttccacccactgcgacggaataccccgcgctttctggatggttgaggccagtttttcacgatcgacggaaacatcgatattgggattcgcctttatccacatcgccggatcgtcaacctcgctttcatcatccagctcgtaaatcagcacgaacatggattcgttcacctcttcaccatccagtatctggcagcaatagtcgtagtgttgtttacaggctgaaacaacgttgctccccgatgtggtgatggcaaataataacccctccggacgcgcccccattcccagttcaagcgcggaataaaccccgttgtcagggtgcaggtgatattcatccacaatggcaagactcgggtttgtaccttcaatggttgccgcttttgctgccagtggctttaacaggctgttggttttcgggtgtatcaccttgtgtgcctgaatatttacccgctttcgcaacggtcgggataaaaggcacatctgacgcgcatcatcaaacacgatccgcgcctgatcacgactcacggcggcggtgtaaatatcctgctgcccgttttccataaccagaaaccagttagccaggatagcggcgaccgtggatttggcattttttcgcggcacttcaatgaatgcgctggtgtatttgcgccgtccggtggccttaaccttaaagcccaggatgcacgcaaaggcgaactgctgccacggctccagctcaatggggctaccgcgcattgcgccttttacgtgcggacacaccctggaaaaggcaataaaccgctccacgacctccggatcgaacgtgtaaagggggttttcaaggtcagaaaaataccgtttaacggcctgtttcagtcgtttacaggccgtaattttgccgttttttacgccttctgcgtactcatgccaggcggtcaagctcgtcctcttcctctgtttccggtggatttctgcggcgacttaccgggtcaaaacccagcaaagaagccattttgatcattattctttccgcgtcagcctttgcgctcagggcggggtttctgctctcgctgccctgactgttaacaatgctgaacccgcgcgtggcaaggtcttcgacggctttgcggtatatggagtagttaacgcaataagctccagattgctccagtcggcgggggtaaggtcttcccgtccggaaagctggcgcgatttttccttccactgcctgaccgcgatttcatccaggtaagcgggggcttttggtggtcttgccatgttcttttttcgcccaattattttcaaaaaaaatcccgtgcacaaaaatttgaggaggcggtcggtgtccggcagggacggtttgtcctgaaaacctcccccaccccctctgacagcctcaccagcgattgcgaaaacattccatgacctcgcggtcacggtcggttaattgcttcgctgtggtgcgttctgtgcgccctgtcctgttggctttgtgccctgtctcctgtgtcttccataagtcacgctgccttatcagtccacgtatcagcctgttttgctcctgttcagtcatcatcgccatacatccagtcgttacggtgtgccgcccgttcttcctgctcgcgatacatgacccgccttacggttcgctttcgtggctggatcttcccgtgtcgtcttacggttgtggcacgtctggcacaatgcctggtgattccactcaggccagaagagaacatcaccgccgccattgatgggaatgatgtgatccaccacaagagctggcgtataaatccccttagccagacaacgcacgcataacgggtttttgctcaggtacagggcgcggtatttgtcccactgtcgggaatacccgcgcgcgcggcggtgtccccgtctggcatcctctgcacgccatgcagcccgcctgtgctcttcacactttccggacttcacgcgcttattacagcccggctcagtgcagcgccttaatggttgccacggcatcagtacacccccacatcacgataaaccgaccagagcgcagaaatagccataggcagttcagactgctccacaggtgaaaccgcttccctgttctcgtacaggaaagcgatgtacatcaggcaaccaacacgtattgccggggtaaattccagcccgtcttcaaaacgtttcccgatatgcttctggcaggcttccagcgccgcatcggtatacattttcagaagttcgccttctccggaaaagtcatcaaggcgaagatgtgccctgacttcatcaggtgtaattttgtcttcactcatctttttcacctttaatttccacagtctgcttccatgcctggctgaactcgtcgccaccttcacgcggcggcattccctcacgctcacgggcttcgttcggattcatgatcccgttcttaatccctttctcatacgtggcgtaacgttcagtaggtgtggcgcgcagtaaatcggctgaatcaaactcaaccagataacgggtaccaggtacgggagaagccaccagcaaagcggccttgatttgctgttcgaagttcgccagccacggacgcattgtcatagtcagaaacgcgcggcttgcctcactgaaattgctgtaggtgctgttgctgtattcctgcagaaaaatcggcgacacgttgaacatccgggcgatgtcttcaatggagaagcgacgggaggccagccattccgcatcctggttactcatccccagttgcttgtaatccatgcccccttcaaggattggcgtttttccggcatttttcgcccccttgtagcgttccagtgcgtctaatgcctgtttacctttcacgccgtccagccattcgcctgacgtgataatccctgccgccatcatgccatctttcataatgctggctccgtgacgctgttgagcaaggccaagccccagcgcctcacggcaaatcgtgatgggggagcgtcccagaaagccatcatccgaggcatagcggagatgcagaacttcttcctgtaaatacgtgcgcaccgttcctgtacagggttcggtgatggtatagcggtatttgtgtgcgcctgtgcgttccggtacaacacaccccggcgcataaggatgaagtgattttggctgaccgtcccgcccccattcaataaccgcataggcgttaccgttcagcaggcagtgacgcatcattgtgcgtttaaactggtaaggtgtctggcacgaattaggctgctcattcagcagaatatctaccggatgactgtccagccattcccgcgcctccctgcccttgtcattacgtaccagatacagataacacggcatcgtggccaccgcctcagcgatgacggaaaccgcgttcatcactgcgggcaatgattcagccgtcccggcagaaacatattctccggatccggtattcggtacgccggacagcaccagaaaatcatcaatggacaggttacgttgctcgctttttttacgactaaaaggccaccacatatcacaaccccgccagctctgcccagcgatgacgattatttcctgccgggcgtaattcagggtgctgtgcaaacaacgaacggtgggcaatctccacgccagattcgggataagcaggcatcgacgtgatcgtgatttccctgagttctgcagcggtaacagtacgcagatacggtttttgcgcgatattccactcttcgcataatgcgcgaaagccaaagctcatccctgtaatgtcgccacgctccaccagcgtaagcacatcttttccaagctgggtatcaggcggtgtcagttcaaaacgtagcccggtgttgtcctcagtcagtaccagagtgccggatttggtgcgccccagcagttgggtatagtcatgctcatacaggcagcgcacatcattacccgccgccagatagtcagcaaaagcccccggcgtgaactgttcgcggaattcgtcccagataatttctgaaaggctgttccagcgaacggcataccccaccagctttttattgctggcggtcagttcagatgtgcggatttcaaaatcggtgtttttcatcggtgtactccataaagctgaaaaaggaggccgcagcctcctccttactcatgactagccagctttcatttccagaattttgatggcgtttgaatccaccacaccaccgcccagatatttatccgtgtggaccttgtagaatccgggttcagtaatgttgtccggtcgggtgcgaatccctgttacatgatcaacgatgaaataaccacgactgaaatcgccaaccgctagcggtgcttttcctgcgccgatgtccggcatggactccaggcagaaaacaggacgaccaagcaacatatccggcgcaccttctttaaggctgtcgcgccagatataatcgccattctcatttttcagcttctgtagtgtccctgccgtgcccgagttcatcacccagacggcatttttgcggtatttcgctttcagcttgtagagaatgtcgatcagttcgtccgctgtaatggcggttccacttgccgctaccactttttcaatggtgccaaaagcgcgggttttgtcactggtcgccgcacgggtgtaagccatgaagcctttcggcttgccgttaccgtcgccattaacaaaatcatcctcttcggtgctggcgaacgtgtcggcaatttcggaggataaccagcccaaaatatccacctctgaaaaatccaggatttcctgcgtggttttcgggtaggcgtagatctgattcagcttgatggttacacgttcaattttcggggtgttggtttcactacgtgcgctgccttctgtgcctcgtcctacagttgcgccgccagtggaaaccagtttctgaaactcatttgattttgcggtcttcacggtcgcgatcacgcgcataacactgtcatcctgtagctggcgcatgacttcgcgatcaagctcaggaattacggtatatccgccatccctgccgctgtcagtgctggtggacagtgatcgcacatctccggttacgatgtagttacgcaattcatcagatgataatttctggatgcccgttcctggcttgctgcgttcttcatcagccacagactcgaggcggtaaatttctgtgtcgagggaatcggcttttgcacgcagttcatcaaactgtttgccctcgtcatcgttcaggctgcggttttcactgtcggctttttccagcagggatcgcatctggtttttcagggcggttttttgctggcggagttcgattaatttcttcatgaaggttttctcgtattggttaagattcaggacgtgaaaccaacacggagggagcgccgcccgacactctcggcatctcgcagatcaacccggcatcgcgcagggggtcaggcggcattgtggcggctcacgtctgagtgccacacgccaacatatacataaaaatcagtatgtaaacatcagccagaatcaccgaacaacctggaacaaccacgaacaaataatttacaaaacctgaaaaaaatggcctattattgctacctctgactacaacaaaggacgcatcatgaatttaagcgcaatggtataccctgatactttcataattaatggcgaatcatttaaaggtaaaagaaacgcaaaagaaaacaaggtattaattccatatacaaatgaaccggaagtaactattggtcaacacattatccagtgtgtcggtaaaaacgagataaatctaaaaattatagatatgaagttgcttcccaatggaaccctcagacagggaaccaaccatccaaatatgttgacgctctatattgaaaatatcacgggaaatgaacatatgacgccacctaaaagtaatacatttaacattggttcaattagtggtaatcaagtgcagataggtgagcataaccatatgctggtaaacatcagcatcactgaactggttgaaaaagtctctaaatcgggggatgtacaagccaaatcagtattaaagcagttactggaaaacagtaccgttgccagcattgttggggctggcgcaagtgccttaataggcttactgtaaaaaaatgacctggagaaaatccaggcctttatcgctttattgtttcactggatcccgcattctgcgtcttattttccacagatattcgatcatcgcttccacctgctcacgattggttgcgaaaatttccccggtcagtgagctgcgcagaaaatcatgatgatccacaacaaacaacgcatcggaagaaagcagacggcgatatttttttgctgtcgtggtttccagatcatcaaaaccatgaaactttttatgttgctggacttcttcaaatgtcactggcatgtatccccctttgctgcccggcgctggcgcttgtgcttctcattcagcgccatcagccgcgtttctgcctcctgctgttcctgtggtgtcacttccccacatggctggcctttcaggtcgtatcgtaccccaccagcaaccagggcgcggtaatagcgcggagactgcgcataagatgccagcgtcgcacgtaatgcccccggcccgaatgccagccccctgacggcgagatcctgcatcaggtcgtcgaatatccccaccttaagcggcttcggtgcttccctgttgaataagtcaggccacatctcagtgaggcggttaacgcgcctgcggtttttgcgctggcgtttggtcatatgccgccacggtgtcacccctgtgggctgccctttgcggctctgctgtgcgttctgattgccgggtatcactttatgcgccgatgtggttttatcccgctcttgcgccgcctgcgtcgttttctgcggcgtgccgtaaatgcctttcggttttcggttaatggtcagctttgtcatgccttcccctgtaattactctgttcgctgttgtgaattaaaacggtatgttatccccgtacaggtcatcgtgctggcctgtctgttgttttgccctgttcagtgcgtcagtggcctgcccctgttggccttttttgccgcccggtcgcgccgttctcgcactgattacgctgtctgcgatgacctgccagccctgccgcgtttcgccgttctgccctgtccactggcttacctgcatgttacccgccacgttcaccagttcgcctttgcggtgttttgccagtgcgtcggcctgtctgccaaacgccaggacggataaccacatcgtcgccgttccgtcatctgcctggctgcatggcaggggaaccgccatactcgccatcgccatttgtgttcccttgctggtggtctttaactgcgggtcagccaccagccgcccgtaagccgctatctgtgctgtcatgctgtctgctctccggttttaacgttgatggttacgcttgtttacacccttacggtgaaattctgcgggttataatcgcacttttgcgggttataactgccgttttgcgggttacgtgcgggttattgatttcctttttattcatacagttaatgcacttatatacatgataacccgcataacccgcataacccgcaacttttcacctcacacagggggttaatcttctgcctcaggctggaacatcagcacgtaaaaaacatgctgcttccccccaattttgccgagcgcctttttcttgtaacggcgatcgttacccgcttccagcattccggcagcactcaacgcgcgggcaaagtgagacggattaaatccctgtgctatctcaccctcaaatacatgcgggaacgtgtaaaaacggaactcgtcatcttcgtttctgatactcccctttctgtatccggcaagctctttaatcggtaaatcacgctcgtcggtgttgggccacggaaggtatctgctgaatccgaacgacgctaaaaaagcctctgcctgttcaaccatctgtttaaactccctgttacccgtgccgaactccttcacccaggcattaaaattatgctgaatggcatcgcggcacgcctgaacatcccaaccagtaatatggacggaaagcaccagcgccgactccagcatggcgaatcgttcccccacacggtgaacctgttcgccgtaactctccggtatcaggttgcgccaccgttcacggcatgcccttaccgtatcctttgcctcctgctggtggtctgccagccatttaacccattcacgccccgccgccccgtgattttctgtccaggcatcctttaacgcgtctgcgtgtgcctttccggtgctgtattcgtgaaactgcgtggctttttccattggcacgttaagcaggcggacaagctgccccgccttgacttttatcccctccgttttgaggaatgtctcaacgtccatttctccggtgctgattgccaccgtgcgccagtgtttgatctccctgttgccgccgtccttcgccccctgtaatttccccgaaccgttaaacagcgtataagccgacgtggacacttcccgcgcgtttccggcctgacctatttcatccaggggtaatagcccgtcattgtgcgcctctgcctcgttggcgatgcctaacgctgtaccgtaccaggtcagccgttgcgcgtccggctctccccataaactggatgcgatgttctgtgtggtggttttccctgccgatgactgttcgaaaagatgtaccccgaagccgtcagcacccaccagcccgattaatggtgcggataacgataccgccacacccagcatcatggacggattaccaccagccagccgcgcaacgatatcgcgccagccctccgccgttcctgccacggaatagccattaacagcagccgtttttccggtaaacaggactggcttttcgcaatcaccaatgaccgaaccgtccggcatgatgtacgcgccaaaatgccagcccgttgttgtgcttaactgccattcctcatggcttccgcttaactgcatccagtcagccaggatagccctgtatttaccgttggttgttacgttcagtccgtggtctttcagcaaccgccagccgtcacggtcgccaatgccaccgcacggaaccgccattgtgatgacttcatggtttgctaattttttccagcgcatcacgcggtaatgctctttaccgattgtccccgttcccagtagttcaagcggggaacataaccacgtctcaggccggataatttcgcctgactgcttatccacttttggcgttacccagaaaacaccatcggcgcgactttcaacgcggggctttaattcatcatcgccctggatttctgtgatttttttctttaagggcaacaccagactttccccgcgctcgtattcgtctttgaggcgaggcaactggtcggataaatccgccgggctgatgtcagttatccccgcgtattcgtatacggtcttcacgccagccacagccagcaacgtgacgatctgtgtaaggctacgttcagtgatgtgccctgcgcggtaaacacgcacacactgacggctatcatcaataatttgataaccggtaatatctttcaggtgttcatctgacagaacgacaggcggcacattgtcggcggcaatatgcttacctgcccattcctgccactctttcgcatggctccacgcatcactacccgcaaagatgataacctccgtcattttgtcggctggctggtgctttaagtttggtgcgcgcttcattttgcctttccccgttcacgaataatttcacgtactgccttaatgcgttccattcctgtaacgcgcatgattctgtcgatgtcgcttaattctgctggtggtgctttacttaccaaggtgaactccctgtcaaagcgcatatgtgacgacacgcagggatgcgcataaccttcgcggatataggtcacacgaaaatcatcgacggttttgatcgttatcgtgctgccgtatttatcctggaaaatatcgccggggcggatttcaggccgagcggggccgctggcagtaaagccagaatttttctttttcatgttttttactccagaggcagctttttagcggcgagctcaatatcagatgtcagagaaacctgtgtatttgccaggtctaacaacaaagaaataagaatttcttctctgctatcggatttatcggtgctaaggctgttcatccacatattgacgacttccctgatttttttcgcagagtgcagggcttcaaatgccaggtcttcaatatcatgtttatttcgcataatcgcccccgccattttcacaatcagcaatcaggatggcttttgcctcattcagcgccatatcagcactaaattgcataacagccagtgagtgaggaacgaaagccccggcatattctgtttcgctggtggcctcaatggtaatcacacgcggttgtgccgtgctcagggcgataaaacgccagatgtatttattcaggttgtgcaagtcccgcccttgcgggtgtgtggtatgatttaacatagctacctcgataatcttgctatcgttggtggttagaagcccggttagtgttagcgcactgccgggtttcgtcgtttgtatttcaataaaaccattggtgtgtttcatgttattttggagtgaaacacacgtcaagccttttttgtatttcttttttgtgtatactgaaacacaccaaatttgaggagtttcagttatggcgactaccaacaaaaacgctaaatcacaattgaccaccgtcagagtcccccacgatgttatggagggcatggaatccgtaaaactggacggcgaaagcaacgccggattcatagtaaccgccatgcgcggtgagatcgcccgccgccaggcagaaggaagcggagaaaatcccctggtttcttcgctcgatgcactggcgcaggtggaaaaaattggagtcaaggctgccgaggagatcgggcaactcgtcgccgtcgcgcgtgaagaactccagcgccgcaaggccaaagaatcagaataatcactatcagcgccgtggtgtgaggtactacggcgcattgctatgcaggacaacacaatgaccgataaagaattgaccaaaatattatcaccggcacggaaaagacggcgcagaaagatagagcatgaatcagaaagattcgcgccatgtgcttttgcccttgagcaattccttaaagagtacaggcgaacaaaaatgggatcgcataccgggaaaacatcgcggcatgacgatgttaaagagcaggaatagcccaccagcaagccagcacactgatcacattgcccaccagccagcaaatcgctatgatgttcgggcttatgtttagtgtttttccattggcgaccgcccccggtcgcctttgttttatatgtcatatgctcccctttacgctgccttacctgaattaatgcgctcccggcttttaacccattccataacctcggacagcagccaacctacagaacgaccgcccagattaaggcgtgacggaaatcgcccttttttctccagttcgtagcgtgtagtgcggcacactcctgttaacttacgacattcatcctcacggattacgcgatctgatagtgattgaaattgtgtattttgattcataaaaaaaacgtcctcgaacgttgccgaacgaggacgattctaggcggtggtaaaacgccgtttgtgtgatatcacactaccagcacgtgatatcactttttgcgtttttgttgagattcacgccccaaatacttttgccatgtctgccaatgtgttttgggaaattctatccctctggatgcagctatagaatcaattaaatctgctattttaggtaatgattccgtgtctaggtctacatctcccatttctggaataagtttaattaaagagtaaataacctcattcctttttgctgctcttttggggttatcttctgtaagattacgaaaactaccttcatcttttacattatttaaatcatccgccatcacacataaataatcaacatctatatcaaatggcttgagattttccccttctagagttatttctaatccaccgccaagtctatcagggtaaaaatataatgttggtgagcttatgatgttattatgtttaaactcaatatcagagaacgcctttttgtttacatagaaaaaaccagcaataaaatttgctatatataatctatcatctattttcttctctaaattaattgttttgccgtcctggaatattagtccattccgtttattatctttaaatccctcaagaaaataaacctcacagttcccaacactatgctcaggaataaatacagaaatatcaatggcacctgtactagcgaaatgatagagatcccttattgtacatcctaacttttctgccgcttcaggtaacggataatagagtcttttaggtaatttcatttagccaccttcagcataacaatattttcatgatttccagccagcacatcgagacgctcaacccacagattcaacgcgtcccgctttgcctgtaaatagcgtgaatggttataggttttttgctgaccaggcatctgatgcgctgtgatgtgctccacgatatgcggatcgacacctaaatcgttcagcatcgttgtaaacgtgtggcgaaagtcatgcagcgtccagtgttcctggttaagccgcttatgcgcatttcgcccatattgcgctaccgtggtatcttttttcagttctccgagcaataaccctgtatgccggttctgatccaccagcttctgaatgaacggcaaaatgccatcggggattggcctgaatatcgtcaccttcgttttgctgtgctcttttggcactgtccacaacatttctttcagatcccattctttgatctctgaaagtctgacctctgccgttctgcacccgaacacaatcagcaagcgcattaacgcgctgtagtaaggcgcgaacacatcaccatcaatagcgcgtaaaatttcctttaattcgctgttgctgtgcaccctctcgcgaatttctgctctcttacccacatcgctgacgatcaaatcgtccagggcattactgaacgcgtagcgcctcctgcggcagaactttagcgcctgtttgcaggtttgcatgacgtgccctgctgctactggtgctttttttcgtacacggtcaaaacatgcgatccactgccttgtatcgcatttatcaagaggaattgcccctatatggcaaatgatgtgcttatccatacgttgcaccagctttatgtagtctttgcggttatccttcgcatattcatccagccagtagttaatcgcctccttcaccgtaacgggttttagcgcttcctgtactgtggcgcacaactcataacgggggtttttaccctcagccagccatgcccggcactgtgcgcgtttttcccttgcagctttcagcgacaattcagggtaagcccccagctttaaccgctctgcggcaacctcacggcctcccgttcggtaccggaaataccaggttaatttgccgccctttgagtgtttaatctccagcccgcccccgtcggagtaaaaacgctctttttctgcctggacagccgccaatttttttaacgtcgaatcgctcagtttgtttagtgcttttcccactatcagatcctcttttcagtcctccagcctcaaaaaactgaccacacaactgaccacacatttcgttgaagccctacgaacagcaacgaacaacaacaaacaagaaaatacaataattatttaaatatcaaatacatacacaaacaagcacgaacaaccccgaaccacaaaaaacactaaatgagaaaatacgggtatttctcagccttcacgcagaagggcaccccgagtcgtttggttgcgatgataaatcgcagaggaggatggtaatgtccagcgcacccgttgtaaacgaggaaaaacggcagttttacaatcgcgttaataaattatttgatatatgaatccagcaccttcagaacgacatccagatcttcttcacgttttagctcatccccctggtgaacgatgtgttccgtcagatgacctttaatcacttcccgcatcagaccgtttaccgcgccacggatagcagcaatctgttgtaaaactgcagcgcattcgtgcggctcgtcgagcattttcttgagcgccacgacctggccctgaatcttactggcacgcgctttcagtttctgtttatcacggattgtatgagacatggcaacacctggttaacaagaatatgaaaaatcatagcactattaatctactggggggtagtatcaggtactgggggggagtagaatcagattgccgaattaatactaagaattattatcatgaccgaatttacaactcttcttcagcaaggaaacgcctggttcttcatccccagcgccatcttacttggtgcgcttcatggcctggaaccagggcactcaaaaacgatgatggcggcgtttatcatcgccatcaaaggcaccattaaacaagcggtgatgctcggactggcagcaactatttcgcataccgcagtggtctggttaattgcctttggcgggatggtgatcagcaagcgctttactgctcaatcagcagaaccgtggctccagctgatttccgcagtgatcattattggcaccgcgttctggatgttctggcgtacctggcgcggcgaacgcaactggctggagaatatgcacgagtatgattatgagcatcatcacgatcacgaacatcatcaagaccacgaacatcaccacgaccatggacatcatcaccatcacgaacatggcgagtatcaggatgcccatgcacgagcccatgccaatgacattaaacgacgctttgatggtagagaggtcaccaactggcaaattttgttatttggcttaaccggtggccttatcccctgcccggcagcaattaccgtgctattgatatgcattcagttgaaagccctgacactgggcgcaacactggtcgtcagtttcagcattggcctggcgtttacgcttgtcaccgtaggcgttggcgcagcaatcagcgttcagcaggtcgcaaaacgctggagcggatttaacactctcgctaaacgcgccccctatttttccagtctgttgattggcttagtcggtgtgtatatgggcgtacatggcttcatgggcataatgtgataactcaatcctttaggcttgcatgttatcttcagcccaggatgattcttaaatcagctatttccgctgactctctgctcgctaaggatgcttttagggcatcctttcatttacactttttacgaaatcatgggatcactaacaaaatatcgcttgtcagttatattgtatggcaggaaagatatgcgactgatattacagatccccaaagtggagagtttatgaccattaaaaataagatgttactgggtgcgcttttgctggttaccagtgccgcctgggccgcaccagccaccgcgggttcgaccaatacctcgggaatttctaagtatgagttaagtagtttcattgctgactttaagcatttcaaaccaggggacaccgtaccagaaatgtaccgtaccgatgagtacaacattaagcagtggcagttgcgtaacctgcccgcgcctgatgccgggacgcactggacctatatgggtggcgcgtacgtgttgatcagcgacaccgacggtaaaatcattaaagcctacgacggtgagattttttatcatcgctaaaaaaagccccctcatcatgagggggaaatgcagacaccttgttattttttattattagccacttgctcgtcttgcttgttattagtcgtatttcacgttgattaatgcggttgcctccagtgcgccagatttaactttgtttgtatcgtagacgtagtaactggctgttatcggaattgaaaccgttgtatctgtaagttttgactttgccgcaatttcttttaaatttgtgtatcctttactgctgttagtgatatttaaaagtgtgactggcgaaccattactttcaagaataaatcctacgccattatcttccgcacctttcagtattgtgttgctgttggttaacaagtcagaacttgataaatacacctgcattttccgtgatgtttgattttgttgacctaataaacttttacaacgcagaataatatccccttgtttactatttattgttgctttgttacctgtggctggtaattgtgaaacgggaatgctgtctaaagtaattaataaatcgtccggtttgcaggttgtggttatcgggttgtatgacaatgtcagattaaaggaatagacacctgcattttgtgccaatgcatttctgtagttatttacacatgcatcccatgacttgccacctaataaacacagtagaaattgtactgcggcactcccgcgtgtcgatgatgaagcactggataatgtcgcaacaccattaatcatcactgaaccgccgccccccgcagaaacattcacttttgcattactggccgcaggtgtcaccgtaactgaataaccactggtgaaactggtctgattatttgacaacgtgatgttgtttttattggtccattcaaaatgtaaatttaattttatggtatcgttataaagtccaacaataatatccgacgggctcataggggtgatagtatttgtactcacgcatgacgaatcattaaaagtatgctcatatgtcgccatttgtgtttgagtaagtgcaaaatccccctgaacaaccaagttgtgctgaacagataactcactataacatgccgcatagctcacaggcataaccatcatcattaatataaattgcattatgcgaatttccatagaaccacctgactattactggcaaatataatttctactttcatcaatctctttaccgaaggtgattgtgcatgaaagtccttgttgcttatcaattgccacattaaccgatggcggtacttcattggtgcgaataaataactggcttccctggccgacaacgccaatattatgaccatggatatcattgacttcataaccaaacattaatggttgaccatccgctcttaacgcttttataaaccagggcttgcgctgatcggtatcaaaattaaccagtacaaccgcgccgcgataaggtgcggcaattttccggttgccacgtaattctgcttcgctatcgctttgcgacacatccagcatcaggtgattttcccgataaggtgtcattccgtcgtatatcaccactccattacggtttgttgtgcgatatttttgcccattgacataagcatctttaattcctggcgcattcatcacagcaaacgtttcggaaagacggttcgccagattaacgccacccgaccaggcgacaatgccccctgaaacactggctccagcctgtcgataagtactcgactgactataactgccattcactgtcgcaaccggcgcgttccaggtcaaattcgccccagctgtcgtttcattttcctgatgctgataactcaggttgaccccatagttaaactgatcccggcttccaacggttcctgataatcccgtattatttgaggcaaccccctgatcatcaaacgtcgttgagttagacatatatatttgccgacgaggcgtcgtaacgtcatcaccccaatcaaagggaatcgatataaaaatattaaaacgtttctcttcatgatgattctcgtcatacgcctggcttgccgcgagggtatagcttatccgccgccagttattggaataactcaactgataatccttactgctgccgctacgcccccagtaatctcgccataacgtacttaaggacacagacccccagccttctggcaatgactggctcatattggcagaaaagctatttttacggccaaaatcgttctggtaataatcggcaatgtcatagatatcgtttatatcacggcgataattatctttattgtttgcccaaacgtgatcgttaaatgtccggtaatcacgcgacaaataacgccaggccgccagaccaaaacgcgtcgacgtttggctcacaaatttgttgtaggcaatttgataactttgcccgtcaaacacatcgccgttgtcttgtttactatgcgacttcgtggcatcgacggaaatggcaccaatgcgggtattccagccagtccccaaagtgaacgcgtaataattattcgcgaccatcgagccaccatacagcgtcaataaattattaaaaccatactgataacccgcctggacaaaatcactttgtttgctcgccccttcaatatggctacgacccgccgcaaaatcatatttcgatacgccgggttgcagcatatttggcaccgctgcataaggtaccagataggtggtaaccgagccgtccgcctctttcacgctgacatcaagatctgctccaccaccggccaactgcaaatctgtaatcgcaaacgggccaggaggaacctctttctgataaacgacaaaaccattctgttcaatagttaccagcgcgttactctgagcaatcccctgcacccgtggcgtaaaattttgtttcgagttaggcaacatctgcatatcacgaaacaaccgcacaccgctgaagcgaacagaatcaaaaatatcgcttgatgtgtacatatcacccacgcgaagcgtgccgagaagttgggcaaatccacgttccagatacagggtattgcttttccacacccctggattgttatttgttttactgaaactggcatcagaatgcagttgccaccccagtaaatttaacccgctgttaaaacgtacatatgtactcttgttattacccgacgctttatagtcgctgtaatactgactcacataataagaggtataaaacgcattaataccccgctcccagttttccggtggaacatagccactttccagttcttccacccaagcctgcgggacactgaaatcgagacgaaaaaccccgatatcccagctatagctcccaccctgaacaagttgctcaaatgttaaacattgcttaccactggcgaagttatcgctattaatgcctaaccgcttgataacttctcttgataaacatgtttcttgcgggttgtctttaacaatgatctcatatttcccgcgccattgcttattgacataaatatcgatgtcatactgccccggcaagggttgattatcatcaagacgaatatttgcaacctgctggtctttcattccacctatcataaaatgggtatcaaaggtttcttcagctgcataagcttcaatgccgagcaataacgctacgattgctgatgcaagtggggtcattctcaacatagacagctcctgcaattaaattttgtcactaatatagttgccgtggtcatcgataatggtcagataccagttgtttgcattattacttttgacattaacactctgactttctaagggggcaatcataatagtttcataattgactttgacattattagctttgacatccgaaatcgtcacccaattagctgagtcattttttatcaccaatccattgccactgcgatttatcagtaactttttaaaggtcgctttattcaccggagcaatacccgccggccggtaaaacaatttgattctgttttgcatcgcaaacttcagtgcattcttaccttcttgttctggactattcggtggaatatccagaacattaagataaaaaatactttccttattactgggtaatttattaggcatgattttaatttttatttgttgcccagaattggccgctactttcactactggtggcgttaacatgaaaggaacctgaatcttttctggcggcagagacgtgtcgccatcatcaatccacgcctgcatcagcgaagagcggtttccctgattcatcagttgtaccatgacctctttctgctctgccgggtaaatgatacgggtcccgaaaataaccattccggcatgcacggggaatatcatagaagagatgagtaaagataataaccctttcatcttaatgcctcttatatttatgctggccgccatgaacatggcggccattttaacttactgaaaaaacaagatgattattttaaatatttaatcctgggcaacacgcataaccaatgaagagttaacagtaccagatgcaacaccactgtcagtcaacttcagatattttgccttaaacggtattgcatattgtccatcagcagttttataactttcaatattaaatggtgcggaaatatccagtacgtcactgctatctcccaaatagagatagtatccaactgtgtcattactactggatattgccttatcattaccaagaattttctcgttggtgatcaacgaaagttttacgccatcaatagtcttcggacaagtaattttcagcatactgctggttacaccaaccgcgccatcataagttgaatatttcgctttaccatcaaatacagtggtgggtacagtcggcatattaatactgactgaatcaccgccagcgacaaatgtacatggtgattcagcaatattacctttaatggttaaagttccggtatctacttcagcagcgaaaataccagcactcataaatacagaagataagacagcgacagcaataattgaatgtttcatgatgcattccttaataagtttattttgttttgttaagagtctgtatctcttggaaacaaatttctcacatcaaaaaagttgccgcaatgtgaacatattgttttgttgatttaaaacaaattaactaatgcgatataaatacaacaaataattcgctataacaaacatttttgaaactgattaattaccgtaaattaccgtaaataacattcattaggtgaataaaaaagccaaaatcattcataggaatgattttggctttttaaatatgcttaatgcttaaaacggtgttggcaaattaatcgtagcgatttaacacgattttgcgtttgtcgttattacccacagttaccacttctgtcgtaacgccttttgcagtagaagaagcacgatagttggtttcaactcgttgtaacaactgcccacaacgttgctgaagatgattattaacaacatccatactgcatgtaggggaactaattctgccattgatggttaatgttgcagtctctgaagagaacgcgggagaagccaatccataggcaagaaaaataattcctgacagccaatacttattcattgaacgttatccctgtagtaaaggttatgcctggatagaatgagtgcataacaaactatagctgtacatccactacacagccacgaaggatgataatgaagcattgcctgtacgatcaatcgactttgtagagtttcggacgaaggtccgcagaatattcgcagtattaaataagtgttcattaatgcggcaaaaacaaatacaccgcatcaatataacatctctgcggtgtatgaagaataaccagaatggttaataggcgttagaccgcgcggaaggaaatctcgcctggaatgacttcaccctgccagtagagctgagctgcaacgcggtcagccagctggcggtagatagcggtaaattcgctctccggacggctgataaccgttggcgtgcctttatcgagatcctcacgtaaggagatgtgtaacggcatctgccccagcagctgtgtatggtatttttcagccagtttctctgcaccaccggtaccgaaaatcggttcatggtgaccacagttactgcaaatatgcacactcatgttctcgacaataccgagcaccggaacctcgactttctcgaacatcacaatgccttttttcgcatcgatcaacgcgatgtcctgcggggtggtgaccacgactgcaccagttactggaatgttttgcgccagcgtcaattgaatgtcaccggtgcctggcggcatatcaagcaccagatagtcgagatccggccacaaggtttcctgcagcatctgcattaacgccttgctcgccatcggtccacgccacaccatcgcattgtcgtcagtgaccagataaccaattgaattggttgccaggccatgagacataatcggtgccatatgggtaccgtccggcgaagttggacgctgattttctgcgcccagcatggtgggaattgatgggccgtagatatcggcgtccagaatgccgactttcgccccttccgccgccagtgccagcgccaggtttaccgccgtggaggatttacccacgccgcctttaccggaactgaccgcaatgatgttcttcacgccattaatacccggctgattcttcacgcgttttaaggtggcgatattgtgcgacagtttccagtcgatagctttcgccccggtgatacgcagcagttcggcgctacattgctcttttaactcttcaaacgcgctatgccagacgaatggcataaccagttccacatgcaacgtgtcgtccatccaggcgacatggtgcaacgctttcagcgtggtgaggttatgcttcagggttgggtgctgaaaattggccagtgtcccggcgaccattgcgcgcaaggcttctggtgatttggcctgggattgttcgttcatcccgactccttttttgtatagataaaccatcagctgatagtttacctgaagaatatagagaagtacttacttaacattttcccatttggtactatctaaccccttttcactattaagaagtaatgcctactatgactcaagtcgcgaagaaaattctggtgacgtgcgcactgccgtacgctaacggctcaatccacctcggccatatgctggagcacatccaggctgatgtctgggtccgttaccagcgaatgcgcggccacgaggtcaacttcatctgcgccgacgatgcccacggtacaccgatcatgctgaaagctcagcagcttggtatcaccccggagcagatgattggcgaaatgagtcaggagcatcagactgatttcgcaggctttaacatcagctatgacaactatcactcgacgcacagcgaagagaaccgccagttgtcagaacttatctactctcgcctgaaagaaaacggttttattaaaaaccgcaccatctctcagctgtacgatccggaaaaaggcatgttcctgccggaccgttttgtaaaaggcacctgcccgaaatgtaaatccccggatcaatacggcgataactgcgaagtctgcggcgcgacctacagcccgactgaattgatcgagccgaaatcggtggtttctggcgctacgccggtaatgcgtgattctgaacacttcttctttgatctgccctctttcagcgaaatgttgcaggcatggacccgcagcggtgcgttgcaggagcaggtggcaaataaaatgcaggagtggtttgaatctggcctgcaacagtgggatatctcccgcgacgcgccgtacttcggttttgaaattccgaacgcgccgggtaaatatttctacgtctggctagatgcgccgattggctatatgggttctttcaagaatctgtgcgacaagcgcggcgacagcgtaagcttcgatgaatactggaagaaagactccaccgccgagctgtaccacttcatcggtaaagatattgtttacttccacagtctgttctggccagcaatgctggaaggcagcaacttccgcaagccgaccaacctgtttgttcatggctatgtgacggtgaacggcgcgaagatgtctaagtctcgcggtacctttattaaagccagcacctggctgaatcattttgacgccgacagcctgcgttactactacactgcgaaactctcttcgcgcattgatgatatcgatctcaacctggaagatttcgttcagcgcgtgaatgccgatatcgtgaacaaagtggttaacctggcctcccgcaacgcgggctttatcaacaagcgttttgacggcgtgctggcaagcgaactggctgacccgcagttgtacagaaccttcactgatgccgctgaagtgattggtgaagcgtgggaaagccgcgaatttggtaaagcagtgcgcgaaatcatggcgctggctgatctggctaaccgctatgtcgatgaacaggctccgtgggtggtagcgaaacaggaaggccgcgatgccgacctgcaggcaatttgctcaatgggcataaacatgttccgcgtgctgatgacttacctgaagccggtactgccgaaactgaccgagcgcgcagaagcattccttaatacggaactgacctgggatggtatccagcaaccgatgctgggccataaagtgaatccgttcaaggcgctgtataaccgcatagatatgaagcaggttgaagcactggtggaagcgtctaaagaagaagtgaaagcagctgccgcgccggtaactggcccgctggcagatgatccgattcaggaaaccatcacctttgacgacttcgccaaagttgacctgcgcgtggcgctgattgaaaacgcagagtttgttgaaggttctgacaaactgctacgcctgacgctggatctcggcggcgaaaagcgtaatgtcttctccggcattcgttctgcttacccggatccgcaggcactgattggtcgtcacaccattatggtggctaacctggcaccacgtaaaatgcgcttcggtatctccgaaggcatggtgatggctgccggtcctggcgggaaagatattttcctgctaagcccggatgctggtgctaaaccgggtcatcaggtgaaataatcccccttcaaggcgctgcatcgacagcgccttttctttataaattcctaaagttgttttcttacgattttgtctctctctaacccgcataaatactggtagcatctgcattcaactggataaaattacagggatacagaatgagacactttatctatcaggacgaaaaatcacataaattctgggcggttgagcagcagggaaacgagctgcatatcaactggggcaaagtcggcactaacgggcaaagccagataaaaagttttgcggatgctgcggcagcggcaaaagcggagcttaagctgatcgcagagaaaacgaaaaaaggctatgtggaaaatgcttcagcaaacgtgcatatcccccccattaccaaagccactcctgaagttgaaacttcccctgagagtaaaaaccaacgcccctggctggctgatgatgcggtcattcggctaactgacgatattaatcgatttgcttttcctcatcgctctcgccccagagagatcaattatctgcacaaagatggtcaaatatggcagctcatcgcgaataacaccagggcatatgatcccgccaacaattaccgttcttatccagaaaactggcagcaggcttttgctgagttacaaatgcgagttcagggtaatcaacagacagggagtgcacaatctgatgcagcattgctctggagtttctggaactcttactctgcagatgaactggtcgatgacttagtcattcgctgtggtctggaaagtgccgttgaaattgcccttctcgctcttcaacttagatataaaccagtaaaaggcgcagtaaccaccatcattccacctaatcacaaagcagaatcgctgccgagttggcatcaacgtctatgtcatcatctttcactcgcttcagaagatgagtggcaacgctgtgtagataaagtactcgccgccattccgacgctatccccagcacggcaaccttttgcggcgttactgctccccgaatgcccggatattgccaatgctatggcgctacgttatgcagaccaaaacgttccggcgatgacctggttaagtatgatggtaagcgatgatgttgccctggccatccaggaaaaatatggtttcccaccgctatataatgatttccgcaaatatctggctacgttgctggcaaataatggaatgcgtggtgtaagccggattcttctcaagctacctgtcgactatcccgtaaaatacacggaccttttcactcacatacacgccaatgctgaagatcttgtcaaatggctatggaaaacgaatcacccggatgcgattcaaattctgatcctcggtgtaaatggcaagaaaaagcacctggaatacttaagcaaagcctgccaaaaacatcccgctgcggctattgccgcttatgctactttgctggcaatacatgaaaataatgagtggcgtaaagcgcttgtcaaactgattaccgccacgccagagttagtatgcgaggtcattccctgggttaatgctaaggcggcaggcatcttatctgaatgtcgtccgctgccagtagctgaagaatgtgaatatgccactgtggatatgttgccggagctgcttgtcgctccaccgtgggtaataaataagaaaaagaatgtcatacccgtatttgatttaccggtacttcccattcctgccgtcacggatatcacaccaggaattacagagttaatcagtcatactgacatatccagattcagtgaaattgcgcaatatcaggcatcacagcaaaccttatttaccgatctgccactaattgaaaaagaaagctgggagacatctttcattccttttacaccagaacaacaaattctttggcaattaggttttaatgaatggctgcattgcgaaaatgacttacatgaaaaaaaatatataccgcaaagcgctgttgatgccttgttgcgctttgatttttcagcactaaaagctgagtttgcgaaatatcacaacaatgccaacaaaagctggaatctatctgcgctttgttacttaccgggacaacaggcgatctcatttctcaaccaaataatcattgaggagcgatattcaggtgagaaagagattctggcggtttttggtagtacggccattcctgcgtttatgacctgcttgcaacgagatcatcaacgcctgtggatattcaccctttttattggagccagtgaactagccttaccaatggcgcagcggttacagaaaaaaatagcttacaaggatgccgttaattggctggcaaataacccgcgccatgccgccgccgggctactgcctttggcgctgggcaaaccgtgccaaaatcgggaatatgcccgccaggcactcctcctgctagtgaaattaaaccagcgagaaacgattgaggaaatcgcccaaggatataatcaacctgatgttttagctgcgctggcaacattatttgatagcgacccactggaagaatatcctgcaaaaatcgccccactgcccggcttttatcagttccccttatggcgcagacctcggcttaaaagtaacaacctgcctctgccagatgacgctatgcgccacctcggcacaatgttgagctttccacgcgacattacctcctacgctgggctggcgatcatcaaagagaccttcacccgcgaatcactggctgactttggctgggatctctacacggcatggacagaagcaggcgcacccgcaaaagagaactgggcatttacctcgctggggattctaggcaatgacgacaccgcgcgtaaactaaccccgctcatccgcgcctggccgggtgaatcccagcataaacgcgcggtttacgggctggatgtgttagccagtatcggtagcgacattgcgcttatgttgcttaatggcattgcgcaaaagattaaattcgttgcattacaggaacatgccagcgacagaatcaatatggtcgccgaaaatcgcggactgacaatggccgaactggaagatcgcctggcaccggatttagggcttgatagcagtggctcgctgacactggatttcggcccacgtcaatttaccgttggttttgacgaaactttaaaacctgtagtgcgcgacgcaaacggcaaagtcctgaaagatttgcccaaaccaaaccagagcgatgaaaaaactcaggcaactgacgcggttaatctcttcaaacagttgaaaaaagatgtacgcgccatagccagccagcagattgatcgtctggaacaggctatgtgccagcgcagacgctggacggcagagcagttccgcctgtttctggtggagcatccgctggtacgtcacttaacccgacggctgttatggggggtttataacgatgaaaacgcccttatcacctgttttcgcgtggcagaagacagcacttacagcgatgcgcaggatgagttattcacgctgccagcaggaaacatcggtataccgcatgtgctggaaatcccccctgaatccgccgctgcattcaggcaaatttacgttgattacgaactgcttccccctttccaacagctcgaacgtggtagttaccaccttgctgataacgaacgtaatgtccatgaattgtcacgctgggacggacgtctctgccaggccggacgcattgtcgggctggaacgcagaggctggcaacgtctggaagaaagcggcagcgtctatgcgatgcgcaaatctaccccttatggtgctctcgaacttgaaacagaacctttttcattaatttatggcgaaacggggtatagcgacctgctgcctgtcgaaagcgtaaaaatcaccgccccttatgatcgctatggtaaacaatcctcacccactttctccgtgctcgacgacatcaccgccagcgagctgattaacgacattgaatcactgtttgattaaaaggatttaacaatgaaaacctatatttatcaggacgaaaaatcacataaattctgggcggtggagcagcagagaaacgagctgcatatcaactggggcaaagtcggcactaacgggcaaagtcaggtaaaaagctttgctgatgctgcggcggcagaaaaagcggaactgaagctgattgcggagaaggtgaagaaggggtatgtggagcaagtagacgctaacgctcactcacatgatgcctcagcaaagaaagtcctagtcacagaggaaaaagcctcaataaatcaccaggcagcaactaatggtttaccctggctggcagacaacgatcccattattcttcccccgaatattgcccgccatgccctcagccaccgcctttggccgggagagccagtaaaaaaaccaaccaaacccgagaaacaaaatttaatttcccgattggcaaatcgtacttatcattattataaaaatctgactttcgattacagctcatgctctgatgaatgggctgatgcgattagccaggcaatcagcttaattaaggcccaaaagactgagatacccgcgcgtactatggcggtacttacttttctggaaatatgtttttgtcagggctggaatgatgaaacctcatccgagttgctggatgaaattgtaagcaccttcggtatcgaatacgcaactgaaactgtcatcttctggtggcaaattgatttcgattttgactataaagatgaacatttgactttctttattaattatgcagatagcagcaaggacagttatagaaggaataacgacaaatttagtttacgtctgcgtaaacatttatcactagcagaagaagaagtatggcaaaattgcattgcaaaattactcgttgcgttaccagatatatcactctatcgccaaccgttaattgccattttaatgccagaaatacccgaagtggcccatgagatcgtacatcgtttacaccaggtcgcagatgttccacaacttgaaatgttgaaactggtagcgacagatccattcacgctcgaaatactggagaactatcaatacattgatgtatttaacacctatggtgccagttggtcagctacggtattacgggaacaaggtatagcggcactggctcgcctggcttcctatgctgaagaagataattgcggtgacgtactgaaatgtattaatcatccgttggccattacggcactcatcgaagccgccgatactaataaacgctgttatgaacgactaataaaaagtgccgaaaattttccttctgccacgatagcggcattagccgaagcattggtaaaaaaagatgataaacgcaaacatacgttgctggtttcattacttaatgcaaatcctttattggtcgaaaaattagtcatcggattatcgtcgcaagcggcaaatttattgcaacaatgtcagcaattgctgaatagtcgcaatgaagattttgcaaactcagaaattctaccaatggtactagtctcgccgccctgggaaactcaaaataaaaataacgacaacagtcctgtgggtaaatacccggcgaaaatcccccctttaccgttgttttatcaacctccattatggactcgcccaaaactcaaaaatagcagcaaggtactgccagataacgccctcctccacctcggtgaaatgctccgcttccctcaggaagaggccctgtatccgggattattgcaggtgaaagatgcctgtaccgccgactcactggctgaatttgcctgggatctgtttaccgcctggctgactgcgggcgcaccgtcgaaagagagttgggcgttcactgcgttaggcgttcttggtaacgatgacaccgcccgcaaactgacgccattaatacgcgcctggcctggtgaatcccagcataaacgcgccaccgttgggttggatattctcgccgctatcggtagtgatatcgccctgatgcagcttaacggtattgcccagaaactgaaattcaaagcattacaggagcgggcaaaagaaaaaattgccgacattgccgaaagccgcgaactcacggtggcagagcttgaagatcggttagcaccggatcttggtctggatgataacggttcgttgctgctggatttcggctcacgccagttcaccgtcagctttgatgaaaccttaaaaccgtttgtgcgtgatgtttctggcagctgtctgaaagacctgcccaaaccaaacaaaagcgatgatgaatcacaggcgaacgatgctgttaaccgctacaaactgctgaaaaaagatgcgcgtaccgtcgccgcccagcaggtagcaaggctggaatcagccatgtgcctgcgtcgccgctggtcaccggaaaactttcagctcttcctggttgagcatccgctagttcgccacttaacccgccgtctgatttggggcgttttagcgccgaaaaccagctactggcctgtttccgggtagaggaagataacagctacagcaccgctgacgatgatcttttcaccctgccggaaggcgatatctctgttggtattcctcacgttctggaaatatcaccgacggatgccgccgcatttgggcagctttttgccgactacgaactgctaccgccgttccgccaactcgaccgtaacagttacgccctgacagaaaccgagcgcaatgccagcgaactgacccgctgggcaggcagaaaatgcccgagcggtcgggtaatggggctggcgaataaaggctggataaagggcgaaccacaggatggaggctggatcggctggatgatcaaacctctgggccgctggtcgttaatcatggaaatcgatgaaggctttgcggtaggcatgtcgccagccgaactgagtgccgagcaactcttaagcaagctgtggctatgggaaggcaaagcggaaagctatggctgggggagtaattcaacacaggaagcgcagctctccgtactcgatgccatcaccgccagcgagctaattaacgatattgaagccctgtttgaataaggaaagagcatggacaaggaattaccgtggctggctgataacgcccaactggaactgaaatataaaaagggtaaaacaccactcagccatcgcaattggccgggcgaaccagtgcctgttatcactgaaagcatcattcagacactgggtgatgaattgctacaaaaagctgagaagaaaaaaaacattgtctggcgttatgaaaattttttactggagtggcagtccgccatcacgcaggccatcaacttgatcggcgaacacaaaccctcaatcccggcccggacaatggcggcgctagcctgtatcgcgcaaaatgacagccaacagttgctcgacgaaatcgtccaacaagaggggctggaatatgcgacggatgtagtgatggcgcgtcagtgcattgcgcggcgttatgagagtgattcactggtcgtcactttgcagtatcaggacgaggactatggctacggttatggctccgcgacctataacgatttcgctctccgtttgcgtaagcatctgtcgctggcagaggaaagttgctggcagcgttgtgccgataaactcattgccgcactgccaggaatacccaaaattcgccgtccttttattgcgctgatcctcccggaaaagcctgaaatagccaatgaactcgccagtcttgaaagctcccggtcaagtctccattcaaaggagtggttaaaggtcgttgctactgataatacggcggtaaaaaaactcgaacgatactggggcctggacgtatttagcgatcgcgaagccagctacatgtcacaaaaaaaccacttcggctacgcggcctgcgccgcccttttgcgcgaacaaggactggcagccattccgcgcctcgcgatgtatgcccataaagaagattgcggcagtctgttggtacaaattaaccatccgcaggtcatccacaccttgctactggtggctgataaaaacaaacccagcctgcaacgtgtggctaaatacagtaaaaacttcccccacgcgacgctcgcggcactggcagaactgctggcgttaaaagaaccaccagcccgccctggttatccaatcatcgaagacaaaaagctgcctgcccagcaaaaagcacgcgatgaatactggcgtacgctgttacaaacgctgatggcatcgcagccacaactggcagaagaggtgatgcagtggttaagtactcaagcccgggcagtactgaatagttatttattggcaccgcccaaaccggttattgatggcaccgataacagcaatctgcctgaaatcctcgtttcaccaccgtggcgtagtaagaaaaaaatgacagctccacgtcttgatttggcaccgctcgaattaaccccgcaagtttactggcaaccaggcgaacaagagaggcttgcctccactgagtctgcccgttatttcagcacggaatctcttgcggaacgcatggaacaaaaaagtgggcgagttgtattacaggaactgggttttggggatgatgtatggctgtttctgaattatatactccccggaaaactggatgctgcacgcaattcactcattgttcagtggcattactaccaggggcgggttgaagagatcctgaatggctggaactccccggaagcacaattagcagaacaggcgctccgcagcggtcacatagaagcgttaattaacatatgggaaaatgacaactactcacgttatcgtccggaaaagagtgtctggaacctgtatttattggcacagttgccgcgtgagatggctttgaccttctggctgcgtatcaatgagaaaaaacatctgttcgcgggtgaggactattttcttagtatcctcgggttggatgcgctaccaggtctgatgttggctttttcacatcgtccaaaagaaacatttccgttaattttaaattttggcgcaacagaactggccctgcccgttgcccgcgtctggcgacgtttcgcggtgcagcgtggtctggctcgccagtggattttacattggccggaacatacggctactgcacttatccctcttgtcttcaccaaatccagcgataatagcgaagctgcattacttgccctgcgtttactttacgaacatgggcatggcgaattgctacaaactgtagccaatcgttggcagcgtaaagatgtatggcctgccctggaacaattactgaaacagggtccaatggacatttacccggcacgcattccaaaagcccctgatttctggcatccggcaatgtggtccaggcctcgacttatcactaataatcagcctgttaccgatgacgctctggaaattatcggcgaaatgctgcgctttacccaggggggacgtttttatagcgggctggaacaactgaaaacgttttgccagccacaaacgctggccgcttttgcctgggatctcttcactgcgtggcaacaagctggtgcccccgcaaaagacaactgggcatttctggcgttaagtctctttggtgacgaaagcacggctcgggatctgacgacacagatcctcgcctggccacaagaaggcaaatctgcccgtgctgtcattggtctgaatatacttaccttgatgaataatgatatggcgctgatacagctgcatcatgtatcacaacgggcgaaatcctcttcattacgtgaaaacgcagcggaatttcttcaggtggtcgcagaaaatcgcgggctaagccaggaagagttagcggacagattagtcccaacactgggtcttgatgatccgcaggcgttgatttttgattttggtccccggcagtttaccgttcgcttcgatgaaaacctcaacccggttatctttgatcaacaaaacgttcgccagaaaagtgttccccggttgcgtgccgatgacgatcaactgaaagcgcccgaggcactggcccgactaaaagggctaaaaaaagatgctactcaggtgagcaaaaacctgctcccgcgtcttgaagctgccctacgtaccacccgacgctggtcgctggcagattttcattctctgtttgttaatcatccctttacccgcctggttacccagcgattaatatgggggggttatccggcaaatgaaccgcgtcgtttactcaacgcctttcgtgtggccgcagagggggagttctgcaatgcgcaggatgagcccattgaccttcctgcggatgctctgattggcattgcccacccgttagaaatgacagcagaaatgcgcagtgaatttgcacagctttttgccgattacgaaattatgccgccttttcgccagttgtcgcgccgcacggtgctgctcacacctgacgagtcaaccagtaacagcctgactcgctgggaaggtaaatccgctaccgttgggcaacttatgggaatgcgatacaaaggctgggagtcaggctatgaggacgcatttgtctatgacctgggtgagtaccggctggtccttaagttttcacccggttttaaccaccacaatgttgatagcaaagcgctaatgagcttccgttctcttcgagtgtaccgtgacaataaatccgtcacttttgccgaacttgatgtgtttgatttgagtgaggcgttaagcgcacctgacgtcattttccattaaaacacagcgggcagtgatgcaactgcccgttattaacacgacttaccagcggggaaagcgatgatcgtgcaaaaagagctggttgctatttacgattatgaggtccctgtacctgaagatccgttttccttcagacttgagatccataaatgctctgaattatttacaggttccgtctatcgactggagcgattccggctacatccaacatttcatcaacgtgatcgagaagatgctgacccgctaataaatgatgcgttgatttatataagagatgagtgtattgatgagcggaaattacgaggtgaatcacctgaaactgtaatagcaatttttaatcgtgaactacagaatatattcatccaacaaatagaaaaatagctttattaaagggggaaacggtattcccccttagatgcgtttcaatttgcccgttacttcaacaaatcaatcaaccgtaacagagccactaataactccagtacggcaatgagcacgattaacttttgtgtcagcgtgtccatccgctctccttattaaggagcgcaacaccagcaccttacccttacactgcctgtcgatactggtttacgtatgttggtacgaaacgttgctctccggatcagggcaccgcctgcggcaccacccgtccagcagccaggacttaaaattggtccgatccggcacaacctcccaacgggcaggattataaatctcattcactgaattgcaatggagtgtggatatggttataatttattcgttggtacgaaatgttgcacaatcagcaagttagcgtcactgtagtaaataaaagaacctgcctcaccagcaggtttttttattttctgcgatctactttccagatattttttgccaatagcccaccataaatattcacatcccggtcaaatggtgcgttgaatataaaatcgatgaacttataaataaacatgagttatatgatgaattaataaaaacagtaatcattttattaaagggggaagcggttttcccccttagatgcgtttcaatttgcccgttacttcaacaaatcaatcaactgtaacagagctactaatagctccagtacagcaatgagcacggttaacttttgtgtcagcgtgtccatccgctctccttattaaggagcgcaacaccagcaccttacccttacactgcctgtcgatactggtttacgtatgttggaccacgatgttgcactccggatcagggcaccacctgcagcaccacccgtccggtagccaggacttgaaataggttcgatccggcgcaacgtcccaacggtctggattataaatctcattatcttaattgcaacggggtccagccatggttataattcgttcgttggaacacgatgttgcacaggctgtggtgttaggcctgaaaatagtaaataaaagaacctgcctcaccagcaggtttttttatttactgtgatctgctttccagatatttttcgctcaaacaactaatgcgccaaacatttattgcgcgtaaaatatcgtttatttcattaatacatttcagggatgaatatatgtcaccgcagaataatcatctgcagcgtccgcctgctgctgtgttatacgccgatgaactggcaaaattaaaacaaaatgataacgcaccttgcccgcccggttggcagttaagtttgcctgcggcccgtgcttttatccttggcgatagcgcgcaaaatattagccgtaaagtggtgattagtccctccgctgtcgaacgtatgttagtcactcttgccaccggacgcggtttgatgttggtgggggaacctggcaccgcaaaatctctcctgtctgaattactggcaaccgctattagcggcgatgccgggttaaccgtccagggcggcgcatctactaccgaagatcaaatcaagtacggctggaactacgccctgcttatcaatcatggtccatcaacggaagcgctggtccctgccccgctttaccagggaatgcgcgacggcaaaatcgtccgttttgaagagataacgcgtacaccgctggaagtgcaagactgtctgttaggcatgctttctgacagggtgatgacggtgccggaactcactggtgaagccagtcagctctatgcgcgagaaggctttaatattattgccactgccaatacccgcgatcgcggcgtcaatgaaatgagtgctgcgctaaagcgtcgcttcgattttgaaactgtctttccgattatggatttcgcccaggagctggagcttgtcgccagtgcttcggcgcgtttgctggcccatagcggtattccgcataaagtgcctgacgcggtactggagttactggtccgcaccttccgcgatctgcgtgccaacggcgaaaagaaaacgtcaatggatacactaacagcgattatgtccacggctgaagccgtgaacgtggcccacgccgtgggcgtccgcgcctggtttttagcgaatcgcgcgggggagcctgccgacctggtggactgtattgccggaaccatcgtcaaagataacgaagaagatcgcgctcgtctgcgccgttacttcgaacagcgtgtcgccacacataaagaagctcactggcaggcttattatcaagcccgccaccgcctgccgtgaggaaagatgcatgagcgagccgttaattgtcggcatccggcatcatagtccggcctgcgcccggctggtgaaatcgttaatcgaaagccagcggccacgatacgtgttgattgaaggcccggctgattttaatgaccgggtagacgaactgtttttagcccaccagcttccggtagctatttacagttattgccagtatcaggacggtgcagcccccgggcgtggtgcctggacgccatttgctgaattttcgccggagtggcaggcgctacaagccgctcgtcgtattcaggcacaaacttacttcatcgatttgccttgctgggcacagagtgaagaagaggacgattcgcctgatacgcaagaggaaagccagaccttgctgctgcgtgccacccgcatggataacagcgataacctgtgggatcacttgttcgaagatgaaagccagcaaactgcattaccctctgcactggcgcactattttgcccaactgcggggcgatttccccggcgatgcactcaatcgtcagcgcgaagcctttatggctcgctggattgcatgggcggtgcagcaaaataatggcgacgtgttagtcgtctgcggtggctggcacgctccggcactggcaaaaatgtggcgcgaatgcccgcaggacattaacaagccagaattgccctcgctggcagatgccgttacaggttgttatctcacaccctacagtgaaaagcgccttgatgtgctggcaggatacctttcaggaatgcctgccccggtctggcaaagctggtgctggcagtggggcttacagcaggcgggagaacaactgctaaaaacggttcttacccgtttgcgccaacaccacttgcctgcttcgaccgcggatatggctgccgctcatctgcatgcgatggcgctggcacagttgcgcggacataaactaccgttacgcactgactggctggatgccatagcaggctcgctgattaaagaagccctgaacgcgccgttgccgtggagctatcgcggagttattcatcccgacaccgatccgattctgctaacgttgatagacacattagcgggtgacggattcggtaaacttgccccttctacgccacaaccgcctctgccaaaagatgtcacctgcgaactggaacgtaccgcaatctctcttccggcggagcttaccttaaatcgctttacccccaatggactagcgcaaagtcaggtgttacatcgtctggcaatactggagatcccagggattgtacgccagcagggaagcacactgacacttgcaggcaacggtgaagaacgctggaaattaacccgcccacttagccagcatgcggcattgattgaggccgcctgctttggtgcaacactccaggaagccgcacgccataaattagaagccgatatgctggacgcgggtggaatcggcagtatcaccacatgtcttagccaggcggcgttagcgggtctggcgtccttcagtcaacaattactggaacaactcacattattaatcgcccaggaaaatcaatttgccgaaatgggccaggcgctggaagtgctatatgccttatggcggctggatgaaattagcggtatgcaaggcgcgcagatattacaaacgacgttatgcgcggctatcgatcgcacgctctggctgtgtgaatccaacggcaaaccggatgaaaaggagtttcacgctcacctgcatagctggcaggcgctttgccatatcctgcgcgatctacatagcggcgttaatttacccggcgtttcgctttctgcggcggtagccttactggagcgacgcagtcaggcgattcatgccccggcgctggatcgcggcgcggctcttggcgcactgatgcgtctggaacatcccaacgccagtgccgaagcggcgctggcgatgctggcacagtttttcccggcacaatccggcgaagcgctgcacggtttgctggcattagcccgtcatcaactggcctgtcagccggcatttatcgccggtttcagcagccatttgaatcaactaagtgacgacgattttattaacgccctgcccgatttacgcgcggcgatggcctggctaccaccacgagaacgcgggacgctggcgcatcaggtgcttgagcattatcaactggcgcaacttcccgtttcggcgctgcaaatgccgttgcattgtccaccacaagccattgcacatcatcaacaactcgaacagcaggcactggcatcgctgcaaaactggggagttttccatgtctgaactgaacgatcttctgaccacccgtgagctacaacgctggcgattaattcttggcgaagcggcagaaacgacgctttgtgggctggatgacaacgcccggcagatagaccacgcgctggagtggctgtatgggcgcgatcctgaacggctccagcgtggtgaacgttccggtggattaggtggctcaaatctcaccacccctgagtggattaactgtattcacaggctgtttccgcaacaggtgattgagcggctggaaagcgatgccgtactgcgctacggcattgaagatgtggtgacaaatctcgacgtgctggaacgtatgcagccttctgaaagcctgctacgcgccgttttgcacaccaaacatctgatgaatcccgaagtactggctgccgcccgccggatagtgcgccaggttgttgaagaaattatggcgcgcctggcaaaggaagttcgtcaggctttttctggtgtccgcgatcgccgtcgccgctcatttattccactggcgcgaaactttgatttcaaaagtactcttcgcgccaacctgcaacactggcacccgcaacacggcaagttgtatatcgaatccccccgctttaacagccgcattaaacgccaaagcgaacaatggcaactggtcttactggttgatcaaagcggatcgatggtggactcggtgatccactctgcggtgatggcgcctgtttgtggcagttacccggcattcgtacccatctggtggcgtttgacaccagtgtggttgatctcacggcagacgttgccgatccggtagagttattaatgaaagtgcaattaggcggcggaaccaatatcgccagtgccgtggaatatggtcggcaacttattgaacaaccagcaaaaagcgtcattatcctcgtgagcgatttttacgaagggggttcatcatcattgctgacgcatcaggtgaaaaagtgtgtccagagcggcatcaaagtgctgggactggcggcgctcgatagcacagcaacgccttgctatgaccgcgatacggcccaggcgctggttaatgtcggcgcacaaatagccgccatgacaccgggcgaactggcatcatggcttgcggagaatcttcagtcatgaattcactacgtccggaattattagaactgacaccgcaggccctgacagcgttaagcaatgccggttttgttaagcgcagtcttaaggaactggaaaatggcaacgtcccggagatcagccatgagaacggcgctttaatcgccaccttcagtgacggtgtccgtacccagctggcgaacggccaggcactgaaagaggctcagtgcagctgcggggccagcggcatgtgccgtcatcgcgtgatgctggtgttaagttatcaacgactttgtgccaccgtccagcccacagaaaaagaagaagagtgggatccggcaatctggctggaagaactggctaccctgcccgatgccatccgcaaacgcgcgcaggcgctggtcgctaaaggcatcaccattgagttgttctgtacgccgggcgaaattccctctgcccgcttaccgatgagcgatgtgcgtttttattcccgtagcagcattcgtttcgcccgttgtgattgtattgaaggcacactttgcgaacatgtcgtactggcagtacaggcctttgtccaggcaaaagcgcagcaagcggaattgactcatttaatctggcagatgcgcagcgaacacgtcacatcatctgacgatctgtttgccagcgaagaaggcaaaacgtgtcgtcaatatgttcagcaactaagccaggcattatggctgggcggcatcagccagccgcttattcactacgaggccgctttcagccgcgcgcagcaagcagcggaacgctgcaactggcgatgggtgagtgaatcgctacggcaactgcgcgccagcgttgatgccttccacgcccgcgccagccactatcatgccggagaatgcttacgtcagcttgcggcattaaacagtcgattaaattgcgcacaagagatggcgcggcgcgacagtgttggtgaagttcctcctgtgccgtggcgcacggtcgttggctctggcattgccggagaagcaaagcttgatcatctgcggctggtgtctttaggtatgcgttgctggcaggatattgagcattatggtttacgcatctggtttaccgatcccgacaccggcagtattttgcacctttcgcgcagttggccgcgaagtgaacaggaaaactcaccggcagctacgcgtcggctgtttagttttcaggctggcgcactggcgggtgggcaaattgtttcacaagcagcaaaacgcagtgccgatggcgagctgctgttagctacccgcaaccgcttaagcagcgttgtgccgctgtcgcctgatgcctggcaaatgttgagcgcgccgttacgccagtcgggcattgtggctttgcgggaatatttacgccagcgtcccccctcctgcatacggcctcttaatcaggtcgataacttatttattctgccggtcgctgagtgtatttcgctcggttgggatagcagccgccagacgctggatgcgcaggtaatcagcggcgaaggtgaagataatctgctgacgttatcactgccagcctcagccagcgcgccttatgccattgaacgcatggcggcgcttttgcaacaaacagacgaccccgtgtgtctggtttctggctttgtcagttttgttgatgggcaattgacactggaaccacaggtaatgatgacaaagactcgtgcctgggcgctggacgcagaaactgcgcctgtggtggcatcactaccttctgtcagcgttctgcctgtgccgtctactgctcatcagttgctgatgcgctgccaggcattacttattcaactgctccataacggctggcgctatcaggaacagagtgctattggtcaggcagagttgctggcgaatgacctcaccgcggtgggtttttatcggctggcacatgtattgggacaatttcgtaatacagaaagcgaggcacgggtagaagcaatgaataactgcgttttgctgtgcgaacaattattccccatgcttcagcaacaaggatgaaatagtgctttttactaagagttctactccagttccggactgctcacaccacggtattaggcatatcctatatagcccctggtgagagtcaccagttccttgattaaataaaatggagttttacatgaaggctttcaataagctgttttcccttgttgttgcatctgttctggttttctctcttgctggctgcggtgacaaagaagaatcgaagaaattcagcgccaatctgaacggcactgaaattgccattacctatgtctacaaaggtgacaaggtgcttaagcaatcttcagaaaccaaaattcaatttgcctctattggtgcaaccaccaaagaagacgctgccaagacacttgagccgttaagcgccaaatacaaaaacatcgcgggtgttgaagaaaaattaacctataccgatacctacgcgcaggaaaacgtgactatcgatatggaaaaagtggattttaaagccctgcagggtatttcaggaatcaacgtttctgctgaagatgccaaaaaaggtatcactatggcgcaaatggaactggtgatgaaagccgctggttttaaagaagtgaaataatctgtcggcggccatgtttcgcatggccgccatacccgtcttagcttttcttcacatgctggcgcgctgccagtccacgcagaaaataacgtaaaaattgatcgccgcattcgcggaagtttttatgatccggtgcacgcatcatcgccgtaatttccggcatcgaaacgcggaactgctgttcggtgaggatcgccagaatgtcatcggttttcagcgaaaacgcgatgcgtaatttttttagcacgatgttgttattaatgcgacgttccggctccagtgccggagcagactcatccttgccgcgtttttcataaatcaggccattgaggaatgacgacaaaacaatgtccggacaacgctgaaaaccctcttcgtcttctttacgtagccagacggcgatctgttccgcggtggcttcgacattacccagcgccagaatacgcaccaggtcattattattggctttcaaaatgtagcgcacgctgcgcagaatatcgttacttagcatgaggccttcaggtgttgatgaggcaaaaagccattttagcagtcttttacaggccaatcgcctcttttaagcttttcagataacggcggctgaccggcacggttaagccattacgcaaaatcaactcggcctggccgttatcttccagacgaatctcctgtaaatgcgcgaggttaaccagatactgacgatggcagcgcagtagtggtgtacgactttccagggtacgtaatgtcaattcggtaaagccctctttcccttcgtggctggtaacgtagacaccgctcatccgactgctgacaaatgccacatctttcatttgcagcaaataaatccgactatgcccagtacaagggataaatttcagcgcctgttgattttctggtaacagcgaaacatcctgcttgctgcgttcctgccgcaaacgcgccagcgttttctccagtcgcgcttcatcaattggcttcagcagataatcaaaggcgtgttcttcaaaggctttaatggcgtattcgtcaaacgcggtgagaaaaacaatatacggacgatgttccgggtcgagcatccccaccatttccagaccactgatgcgcggcatctggatatcgagaaacagcacatccgggcgcagtttatgcaccgcgccgatcccttccacggcgtttgaacactcaccaacgatttcaatatcgctctgctcctgcaaaaatacgcgcaggttctcccgtgctaacggttcatcatcgacaattaagactttaatcatgcctcgtccctccatggtagtcgtaacgttattcgggtgtaactatcaggctcacaggcgacgcttatcccatagtcatcgccaaaccgttcacgtaaacgcttatccaccagattcatccccagcccactggcattggttaccggttgatacaaaccggcattgtcttcgatctccagcatcaaatgttgcccctcacgtcgggcgctgattgccactcgccctgtatccagcagttgtgatgtcccatgtttaatggcgttttccactatcggttgcagggtaaacgcgggcaattgctgctgggataattcttgcggaatagcaatgttgacctgcaaccgcgactggaagcgcgccttttcaatttgcagataagcgttcacatgttcaatttcgtcggcgagagtaacaaactccgaaggccgctttaagtttttgcggaaaaaagtggaaagatactgcaccagctggctggcctgttcgctgtcgcgacggatcaccgctttaatggtgttaagcgcattaaacaaaaaatgggggttcacctgggcgtgaagcagtttgatctctgactgggtgagcatcgctttttgccgctcatattgcccggcgaggatctgcgccgaaagcagttgcgcaatcccctcgcccagcgtgcggttgattgaactgaataaacggtttttggcttcatacaatttgatggtgcccatcacccgctgattttcaccacgcaacggaattaccagcgtcgaccccagtttgcattgcggatgcaaagagcaacgataaggtacttcgttgccatcagcgtagaccacttcaccggtttcaatcgcttttaaggtgtaagtcgaagatatcggtttgccgggtaaatggtggtcgtcaccaattccggtaaaggccagcaatttctctcgatcggtaatcgcgactgcaccaatatccagctcctgatacagcacctgtgccactttcatgctgttcacttcgttaaacccctggcgcaaaatgccttccgtcgaggcagccactttcagcgcagtggcagaaaaagccgaagtgtatttttcaaacatcgcgcgtttatcgagcaatatacgcataaacagcgccgcgccgacggtattggtgaccatcattggcgcagcaatattactcaccagacgcaccgcatcttcataaggtcgggcgatcgccaggatgatcaacatttgcaccatttcagcgacgaacgtgacggcaccggcggtaatggggttaaagactttatcagtgcgcccgcgacggatcaggatgctgtgtaccaggccgccgagcaatccttcaacgatggtcgagatcatgcaacttagcgcggtcatgccccccatcgaatatcgatgtaacccgccggtcaggccaaccagcccaccgacgaccggaccgccgagtaagccgcccattaccgcgcctatcgcacgggtattggcaatagaatcgtcaatgtgcaacccaaaccaggtgcccatgatgcagaagatggaaaagacgatgtagcagagaaatttatgcggcagacgaaccgtgacctgcattaacggtatgaataatggcgttttactcattaaccatgcaatgactaaaaaaacgcacatctgctgaagcagcagcaacaccagattaaaatcgtacatacccgcaaaccacacttccctttaaaacgcgtaacatacattgcctgcgtttaactttctttgaactcttgcagaaaaatgagaattcgtgagtacgatcactcaaaatcgcctggcaaaaataaaatcaccctataaatgcacaaaaaacgggcaaaactacctggttcgcaaaactgcgtctaaagttaaaccgggacctcgcgagcaagggtgagacgatggcgctttacacaattggtgaagtggcgttgctttgtgatattaaccctgtcacgttacgcgcgtggcagaggcgttacggattgctgaaaccgcaacggacagacggcggtcatcggctgttcaacgatgccgatattgaccggatccgcgagatcaaacgctggatcgacaacggcgtgcaggtcagcaaagttaaaatgctgctcagtaatgaaaatgttgatgtgcagaacggctggcgcgatcagcaagaaacattactgacttacttgcaaagcggcaatctgcatagcctgcgaacgtggatcaaagagcgcggtcaggattaccccgcccagacgctcaccacgcatttgtttattcctctgcgtcgacggcttcagtgccaacaaccgactctccaggcgctgctggcgatcctcgacggcgtactgatcaactacatcgccatctgtctggcttcggcacgtaaaaaaaagggtaaagatgcgctggtggttggctggaatattcacgataccacccgtctgtggctggagggctggattgccagtcaacaaggatggcgcattgatgtcctcgcccactcgctcaatcaactacgccctgaactgttcgaaggccgtacattgctggtgtggtgcggtgaaaatcgaacctccgcccaacaacagcaactcaccagttggcaagaacaaggctatgatattttcccactcggcatttaatgattcgttaacaaatgcgctttactgtacaatcctttcgttaacataaggagtgcattatgcgcatagctaaaattggggtcatcgccctgttcctgtttatggcgttaggcggaattggtggcgtcatgctcgcaggttatacctttattttgcgtgctggctaagcgcctgcaccagcctttcaaacaggcggtctgcgatgatcgccgccagtgccaccagtaacgccccctggatcacatacgcggtattaaatccgctaagcccgatgatgatgggcgtacccagcgtgctggcccctaccgttgaggcgatcgtcgccgtaccaatgttgataatcaccgaagttcgcacgcccgccagaatcaccggagccgccagcggtagctcgaccttacgcagtcgctgaccacgactcattcccatacctttcgcaacttctgtcacgctggcatcaatcgctcccagcccggcaagtgtcgcctgcaggacgggcagcacaccgtaaaggatcaaggcgataatcgctggttgcagaccaaacccgatcaccggaacggcggtcgccagcactgcgacgggcggaaaagtctgtccaacggcggcaatagtttccaccagtgggcgaaattccgcgccccacgggcgagtgacagcaattccggcaccagtaccaatgatcaccgcaaacaaactcgaaattcccaccagccagaaatgagccagtgccagagcggcaaaactttcttgctgataaacgggtcgtggcagttgagggaacaaggcagcaaacagcggctggctgtaaggcagccagaaaatcagtgccacaaacaaagcaatgagccagaacagcggatcgcgcaacatcttcatacgcttacgcctcctccagcagatcctgaaaatgcagcgtgccgctaggctggccctgcgtgttcaccaccggcagcacctcgcatccccgcgcgacaaacagggagagcgcatcgcgcagcgtcatctcttctgccagtgcctcaccttctgcccgttcttcgcgacgcacgtaatccgccacactacgtaacgaaagcaggcgcacacccagttcactacgtccaaaaaactggcggacaaaatcattcgccggacgagtcagcatcgtcagcggattcccctgctgcaccacttcaccgtgatccatcaataccagatgttctgccagccgtagcgcctcatcaatatcatgagtgaccagcacaatggtacgccccagcaaacggtgaatgcgcgtcatctcttgttgcaacgcgccgcgcgttaccgggtccagtgcgccaaaaggttcatccatcagtaagacttgcggatcggcagccagtgcgcgcgctactcccacacgttgctgctgaccaccggaaagctgatgcggataacgctcacgtaaatttgactccagccccagtagcgccattaattcgtcgatacgatcgtcaatcctcgcccgcgaccatttttgtaattgcggcacggtggcaatgttttgtgccacgctccagtggggaaacaggccaatagattgaatggcatagcccatacggcggcgcaactccagtactggcagcgagcgaatttcttctccggcaaagcggatctctccgctgtcatgttccaccaggcggttaatcattttcagggtggtggatttgccggagccagatgtgccaatcagcaccgaaaaactcccttcctgaaaattgagattgagatcgttaacggctttttgtgcgccaaacagtttgctgacatggctaaattcaatcattacgtttcaccttcaacagtgcgataagtaaatcgaacagcgcatcgatcagcaccgccagaacaattaccgggatcacccccagcaacactaaatcaatggcgctgcttagcagcccctggaaaaccagcgcaccaaaaccgcctgcgccgattaacgccgcaatcaccgccatgcctacagtttgcaccatcaccacccgcaggctgcgcagaaataccggtaacgccagcggtaactgaacatgcaggaatcgctgcgccccgctcatccccatcgctctggcgctctccagcacatcgcgcgggatctggttcaagcctactaccacgccgcgcaccagcggcagcaaggcatagagcaccagcgcaatcagtgcgggtgtcattccggttcctgctatgccgagcttcccctgccacggaaaggccgtcaccagcgcggcaagcggcgcaatcaacaggccaaagagcgccaccgaaggcacggtctgaatgacattgagcagagaaaaaatcgccccctgccgcgcggtggaaaagtagcaccagatgcccaatggcacaccaatcactaacgcaggcagcaccgcaccaaacagcaacgtcagatgttgagccagcgcgtcgtcaaacacatcctgacggttggcgtattctttcattagcgagagatcgttaagcgtgccggagtaaagcaaccacagcggaataatggcaatctgcatatgcaacaaccagcgccacagcggatgcgtggagattcggcggatggcatcgctacaggccagcaatgccagcgccgcagccagccagaaaccactgccgaggctggtacgcgccagcgcactgccattttgcgccagttgggtcgccgcctttccagctccccacaccagcaatacgaagacgaattgcgccagaatgagtgcaaaaatgctgccttttttagcgggaataaaacaggctgtcagccaggcgcaaccaacgcccaccagcatccagatcgtttgcggccacagttgccagagatgacgcccttcacccgagactaaacgattaggcgcgtagctgataaacggcagcgctgctgcgattgccgtcagcaacagcagcagcgccagaacaggattaatacgtagataagtcacgggaaattacttcgcccaccctttttgtttcaggtagtcggcagccacttttttggcatccagtccttccactgcaatgctggcattcagttgctgcaatgtttttgcatcgaggctggcgaagactggctgtagccactgtgccatttgcggatactctttcagcaccgactcacgcaccactggtgcaggcgcgtagataggttgcacgccttgcggatcgcttaaggtttgcagccccagcgccgcgaccggaccgtcagtgccgtaagccattgcggcattaacgccagaagtttgctgggcagcggctttaatcgtcaccgccgtatcgccaccagccagtgacagcaactgatcctgaccgagcttaaagccataggctttttcaaacgcgggtaaggcatcggcgcgttcgataaactctgccgaggctgccagtttgaaggtgccgccctctttcagataacgactcaggtcagcaagcgaagtgagtttgtttttctctgccacatcctgacgcacggcgatggtccaggtgttatttgcaggtgcgggcgtcagccagattaacttgttttgctctgcatcgagttttttgactttctcgtaaccttgctgcgcgtttttccacgctgcatcgttttcatctttaaagaaaaacgcgccattgccggtatattccggatagatatccagttcaccggaagtaatcgccccgcgcaccacaggagtcgttccgagttgcactttattgaccgtcggtacgccgtggctttccagtacctgcaaaatgatattgccgagcagcgcgccttcagtatcgatttttgaaccgactttaacgggggaagccgcgtgcagcggcaggctcacggctgccaacaaaaccagtgaacctgcccagacctttgagagtggcatgatgctttcctcattcttttactgttgttttcagcgaattaagagaaaagcatagttgataatggcgggattagcctgagcggacggattcagttgcagaatcagataaatacttaagaggcatattcggtccggcgtttcctgccggatgcggcgcgagcgccttatccggcctacaaagggcgaaaattcagcaagttaagatatgaacatcaggcaaagggcgcaaatgtcacgcccttactaaagcattacagcaactcaaactcgcctttcttaacgcgtgcggaatcagtgccgataaagacattgaacttgccaggctcggcgtcatatttcatctgttgattccagaacttcagcgcctcgatatcaatcgggaagctaacggtctgagtttcgcccggtttcagggtgattttctcaaagcctttcagctgtttcaccggacgactcatggaagccgtcacatcctgcaagtacatctgcactaccgtggccccttcgcgtttaccggtgttcgtcacctgcacgctggccgtcactttgccgtcacgcttcatggtcggcgcagaaagtttcacatcagagacggtgaaagtggtatagctcagaccatagccgaacggataaagcgccccgttagcttcatcaaaataacgcgaagtgtatttgttcggcttgtcggcattatacggacgaccggtgttcagatggctgtagtacaccgggatctgcccgacagaacgcgggaaggacatcggcagcttgccggacgggttgtaatcgccaaacaacacatcggcaattgcattaccgccttcagtccccgcaaaccaggtttccagaatcgcatcagcctgctgatcttctttcaccagcgccagcggacgcccgttcatcagcaccagcaccagcggtttaccggtggctttcagcgccgcaatcaagtcacgttggctttgcggaatagtaatatcggtacggctggaggcctcgtgcgccatcccctgtgcttcaccgactacagccaccaccacatcagattgtttcgccgtctgcaccgcttcatcaatcatctcttgcggcgaacgcggatcgactttgaccgcttcttcatactgattcaggaaatcgataatgcctttgtcactggtaacgttcgcccctttggcatacagcactttaccgttttcaccgacggcatttttaatcccggtcagcacggtcacggattgatctgcaacacctgccgccgaccagcttcccatcacgtcacgcttgctgtctgccagcgggccaaccaccgcaatggttgcggattttttcagcggtaacgtttcgagacggtttttcagcaacaccaggctttcacgcgccacttcacgcgcttctttgcggtgcaagcggctttcggcattggtatccaccgggtcagactctttcggaccgagatggctgtatgggtcgttaaacaaccccatatcatatttaacgttcagtacatggcgggcagcatcgtccagctctgccatcgtcactttaccggatttaatcaacccaggcagatacttcgagtagtactcgtcgctcatactcatgttgattccggatttcagcgccacgcgcaccgcatcttccgggtctgccgccgtgccatgtttaatcagctctttgattgcaccgtgatcggaaacggtgatgcctttaaagccccactggtcgcgcagaacatctttcagcagccaggaatcggaggtggctggcgtgccgttcagcgagttcagcgccaccatcaccgcgccgctgcctgcgtccagccccgctttgtacggcggcatataatcattaaacaggcgctgcggactcatatcgacggtgttgtactctttaccgccttctaccgcaccgtatgcggcaaagtgtttgacgctggtcatcaccgagtagcgatctgccgggcttttaccctgcatcgcttccaccatggttttacccattattgaggtgagatacgtatcttcgccaaaaccttcggaagcacgtccccagcgcggatcgcgcgagacatcgaccatcggtgcccaggtcatattcaggccatcatctgccgcttcataagcagagacacgtccgaccgttttcactgcatcgaggttaaaagacgaggccagaccgaggctaatcgggaacaccgtgcgctgaccgtgcagcacgtcgtaagcaaagaaaagaggaattttcaggcggcttaattccatcacctgatcctgcatggcgcggatatcctgacgggttacggtgttgaaaatcgccccaacctgaccgtctttgatcatctcgcggatcgcctctttcgggttatccgggccgacgctgattaagcgcagctgaccaattttctcatcaactgtcattttcttaagcagttcggtgacgaacgcatcccgcgcttcgggcgttaatggatggttgccgaataaatcatccgccagtgctggctgcagggccagactcaccgcgattcctactgaacatagccatttcatatggatttttcttcctttgttgcccgacgtggcagcgaaaatggtgcaaaaaccgtagtttgccataagcatgatggagagagaaaaagaatgctcagtttattgtctgaattttcaaaatattcactcgctgaattgttatacaaggcgctattctagtttgtgatattttttcgccaccacaaggagtggaaaatgtcttccatgacaacaactgataataaagcctttttgaatgaacttgctcgtctggtgggttcttcacacctgctcaccgatcccgcaaaaacggcccgctatcgcaagggcttccgttctggtcagggcgacgcgctggctgtcgttttccctggctcactactagaattgtggcgggtgctgaaagcctgcgtcaccgccgacaaaattattctgatgcaggccgccaatacaggcctgaccgaaggatcgacgccaaacggtaacgattatgatcgcgatgtcgttatcatcagcaccctgcgtctcgacaagctgcacgttcttggcaagggcgaacaggtgctggcctatccgggcaccacgctctattcgctggaaaaagccctcaaaccgctgggacgcgaaccgcactcagtgattggatcatcgtgtataggcgcatcggtcatcggcggtatttgtaacaactccggcggctcgctggtgcaacgtggcccggcgtataccgaaatgtcgttattcgcgcgtataaatgaagacggcaaactgacgctggtgaaccatctggggattgatctgggcgaaacgccggagcagatccttagcaagctggatgatgatcgcatcaaagatgacgatgtgcgtcacgatggtcgtcacgcccacgattatgactatgtccaccgcgttcgtgatattgaagccgacacgcccgcacgttataacgccgatcctgatcggttatttgaatcttctggttgcgccgggaagctggcggtctttgcagtacgtcttgataccttcgaagcggaaaaaaatcagcaggtgttttatatcggcaccaaccagccggaagtgctgaccgaaatccgccgtcatattctggctaacttcgaaaatctgccggttgccggggaatatatgcaccgggatatctacgatattgcggaaaaatacggcaaagacaccttcctgatgattgataagttaggcaccgacaagatgccgttcttctttaatctcaagggacgcaccgatgcgatgctggagaaagtgaaattcttccgtccgcattttactgaccgtgcgatgcaaaaattcggtcacctgttccccagccatttaccgccgcgcatgaaaaactggcgcgataaatacgagcatcatctgctgttaaaaatggcgggcgatggcgtgggcgaagccaaatcgtggctggtggattatttcaaacaggccgaaggcgatttctttgtctgtacgccggaggaaggcagcaaagcgtttttacaccgtttcgccgctgcgggcgcagcaattcgttatcaggcggtgcattccgatgaagtcgaagacattctggcgttggatatcgctctgcggcgtaacgacaccgagtggtatgagcatttaccgccggagatcgacagccagctggtgcacaagctctattacggccattttatgtgctatgtcttccatcaggattacatagtgaaaaaaggcgtggatgtgcatgcgttaaaagaacagatgctggaactgctacagcagcgcggcgcgcagtaccctgccgagcataacgtcggtcatttgtataaagcaccggagacgttgcagaagttctatcgcgagaacgatccgaccaacagcatgaatccggggatcggtaaaaccagtaaacggaaaaactggcaggaagtggagtaaaaattacggatggcagagtatcgccatccgaattcacttaatcgttctgtgccgtctgccccgccgccgccatttgggcggctttttgttttttatagctcaacgctgctgccggcacaggcatcactttaccggtttcaatccaggtacgcaggcggctggcatcggcaaaatgggtatatttgccaaacgcgtccatcactaccagcgccaccggtttattattgataaccgtacgcatcaccagacaatggcccgccgcattggtaaagccggttttggttaactgaatattccagttatcgcgatacaccagatgattagtattgcggaacggcagcgtatacgtcggattagagaaggttgccatatcttcccgggtagtacttaactgcccgatcaacggatattgtttgctggcaatgagcagtttggttaagtcacgggcagttgaaacgttatgcaccgacaatccggtaggttcaacaaagcgcgtgttgttcattccgagcgatttcgctttcgcattcattgccttaataaaggctttgtaaccaccgggataatggtgcgcaaggcttgccgccgcgcggttttctgaagacatcagcgccagcaacagcatatctttacggctgatttcgctattcagtcgtacgcgcgaatagacccctttcatctccggcgtctggctgatatccacttttagtttttcatccagcggcagtcgtgcatccagcacaaccatcgcggtcattaatttgctgatagacgcaatcggacgcaccagatccgggtggttcgaatagatcactttgttggtattcagatcaacaatcatcgcgctaccggaggcaatttccggttgtgaagcggtggtagcggctgccgttttcgcaacggcctgcggtgcaaaaggcacagccagcatcagggccaggctaaataaagaaactcgaaatttcggcatgatgagcattcagatagtggttcacgcgcacgggttgcgcaccgccggagtaaggatttactgaggctagcgacgccatcataacgagcaaaaagtgcgatcgtcaaaggagaatcgtgaggaaatgctgcattgctgacatttacgccagcaatgcaacgtcaaagaactttctagaacaaacgataaccgtagccccatagtataacggttagggcgagcagcacttccagtaccagcacgccaatcgccagcgtcgaactagagaagctaaggccttcctctttgttgatattcaggaagctcggaataccaaggtaaagcaggtagccggtgtaaaacagcgccaccgtgccgaccagcgcacacaaccagaccagtggataaagcgccaccagaccgcttaaaaacagcggagttgcaacgtagcccgcgaagaccatgcagtgcgcaagtgacggacgctgcggataattacgcgccatccaccagatgacccgccccatcaccgcgaccccagccagcataacgccgtaaaacaagacagccagcgccagtccggtaaaccaggataacttcaggatagtgccatcgccaaaattccagccaatctgtgtagtgccaatgaaggcgcaaatcaccggaatcgccgccatcagcaaaacgtggtgggtgtaatggtgagaaatcgtttcgttttcgcgattaatcacctgcatttcacgatcgggatgggaaaacagtccccagacatggctcataccgcccccttgttgtgagttcatgaacctgacagttcaagtataagtcagcttgtgattattttttgttcgcccatgtaattttcactgtctgatgaacgtcctttttcagcgtgaatgattcacagggtgtatgcttactggcaaccaaagggagacagactggcctatggatctcaatacacttatctcacaatatggttatgccgcgctggtgatcggtagcctggcggaaggtgaaaccgtgactttgctgggaggcgttgcggcgcatcaggggctattaaagttcccgctggtggtactttctgtggcgcttggcggcatgattggcgaccaggtgctctatctgtgcgggcggcggtttggcggcaagctgttacgccgtttctcgaaacatcaggataaaattgagcgggcgcagaaacttatccaacgccatccgtatctgtttgtcattggtacgcgctttatgtatggctttcgggtgattggcccgacgctgattggtgccagccagctgccgccgaaaatctttctgccgctgaatattctcggcgcatttgcctgggcgttgatttttaccactattggttacgctggtggtcaggtgattgcgccgtggttgcacaatctcgaccagcatttgaagcactgggtctggttgattctggtcgtggttctggtggtgggcgtgcgctggtggctgaaacgacgcgggaagaaaaagccggatcatcaggcgtaaaaccattgccctggataaggcgttcgcgccgcatccgacatccggagtaccatgcctgatacgacgcttgtgcgtcttttcatgccgaccaaaatattacccaatgaaatatccacgcacctcactgcgctattctgggttgaactgtggattcgccaacataaagccgccatccactatcaacgactgcccggtggtgtaatttgcgccctccgaacaaagccacaccaccaggctggcaatctcatgcgttgcgccaaaacgccgcaagggaatcgaaggctccgcgtcgggcttcacgtcgctgtcatccatgccattcattggcgtggcgatcgccccaggcgcgactgcgttcaccaaaatcttatgcctgaccagctccagcgccatcgctttggttaacccaccgagcgcatgtttagcggctgtgtaggcgctggcatccggcagcggcgtatgttcatgtaccgacgtaatgttgatgatgcgaccgccctgcccttgtttcaccatctgacgagccgcaatttgcgagcataagaatgcaccatcgacatcaacggtaaaaatcttgcgccactcatcaaaagccatatcaagaaacggcgctttggtcattgcacccgcattattcaccagcacatcaatgcgccccagccgttgaatgagtttctccagcgccagtgccccttctggtagattgccgagatccagctgcacgatctccgcacgtacgccgtggctaactacctcacgcgcggtatcttttgccccttcttcatctgagtgccaggtaataccaatatcaaacccctgctgcgccagtaataacgcgcactctttgccgatccccgaatcggaggcggtaataatcgcaacctgtgccatcgagttctccacttaacgctgaataaacgttaagtatagaaggcgcatatcatcagcgtttgtaacccccgcccaacgcaccagtgagttgaatggaggcatccagccactgcccttgcaataacaggccattggcccgctcacgcagcgcggggattctggcttcgctgacgcgggaaccagcaatgatgcccgcgttaaagcgcgcctgcgcaagacctaccacacgcaaggcatcgcgctcaatttgcgcctgatgctggtttttctccgccagtgtctgaacctgactggctgcccgcgccacgtcattcaccgcttcaaccaccgctttgttgtagctggcgatagacaagttgctttcggcttttgcgatatcgagattggcgttaagacgaccactatcgaaaatgggtagcgtcaggcctgccgtaacgcccatttgctgcgcggaatgacggaacagatcgcttaagtgcaacgcatcctgttgcaggaaggccatcaggttgatgtcaggataaaatgccgcttttgccgcatcaatggtgcttagcgatgactcaacgtaccagtgcgccgcctgcaaatctgcccgccgggccagtaaggagtaccccagttcatcaggaagctggcttgccactttcggcaacgcgaccggtttaagcttcaatgactttgtctggttatttgtaagtgcgcttaaccgtgcctcaataattttcattttccccgcgacatcgttgagctgctgccgggttttgctggcattaatatcggtttccacaccttcaactgaagaagtaatcccgttctgatatagctggcgatcggtcgcgataatggtgttctgctctttttctatttgctgcaagaccgtgtttaacgccgcctgggtttgccactcccagtacaggcgggctacgctgccagccagcaattggcgggtttgctcgcgttccgccgcccgtgctttaaccgtacccaggcgggcagtaacctccgcccgattctttccccagatatcgagatgccagcccgccgttaagccaaaagtaccgttggtgtaccacgggccggtcgtacctgcggccggatcgttcagagcaaacggccccattaagccttctgccgacattttttgccgctccatatccgccgaaaagtcgatctgcggaccatcctgagtggcaactgccttcgcctgggcttcagctagctgaatgcgctgttcagccacctgcatatccggtgcgttctgtagtgcattgttaattaaggaagtgagttgattatcgtgatactccagccaccattggctgtctggccaaccatttttcagcgccgtgggtaatgcggtgtcaacttgtgcagcgggcgtttgctggcttaacgcctggcgggtttcatgcataggcgcacacccggccagcatcagtaacagcggaaaacaggcgatggctggataaaaggaatcacgattcatgggggaataatcaggtaagaaaaggtgcgcggagattaccgtgtgttgcgatatattttttagtttcgcgtggcaatacatcagtggcaataaaacgacatatccagaaaaatatacactaagtgaatgatatcttccgatttatcttaatcgtttatggataacggcaaagggcttcgttttttcctatacttattcagcactcacaaataaaggaacgccaatgaaaattatactctgggctgtattgattattttcctgattgggctactggtggtgactggcgtatttaagatgatattttaaaattaattaatgtcatcaggtccgaaaataacgagaatatttcagtctctcatcctgttgcgctcctgtcatgtgcattgcttcatataatcactggcgcaaggagcgcgcagggggcggccaatcgccgccgccccctgcacccccgggctctggcgaacaaaatcgccgctgcgcggtgccctcggcttatcccttacggctaccgggtcgggcgcgaggtaacatccctgtaaaacgcgccctcagcccacatccatgtgggctgccccggccttcagggaacgcctcggcaattttgacgccaccaaacaaccgtgcggcctattgataaagagctaacacattgtcaaaaaacatcactatggttttttagagtttctcgatatcaattgcctgaatagcccttgcaatatcaggggaattattcaacacccgaacatgctgaaataattccgttgcttcatcgtattctttacgcaaataactcaaccactgtttaatccgcgcaacgtgatataacccggtatcgccctgcttttccagacgggtatatttttgcagcaaagcaaccacctccggccacggcattcgcggttcgttatattttaccacccggctcaggttgggaatattgagcgccccgcgaccaatcatcactgcgtcgcagccgctgatcgccatgcattgttgcgcgctctgccagtcccagatttcaccgttggcaatcaccggaatattcagccgctggcgaatatcgccaatcgcctgccagtcaatatgctccgcgcggtaaccctgctctttcgtccgcccatgcaccaccagctccgtagcgccagcctgttgaaccgcatcggcgatttcaaatttcttctcaccgctgtcccagcccagacgcactttcacgctgacgggcaaatgcgccggtacagcttcacgcatcgcttttgcaccctggtagatgagttcaggatctttgagtaacgtcgccccgccgccgctaccgttaaccgttttcgacgggcagccgcaattgagatccacgccccaggaacctaactccaccgcacgggcggcgttctctgccagccattgtgggaactgacctaacaactgcacgcgcaccagcgtaccagatggtgtccggctggcgttttgtagctcagggcaaatgcgatgaaagacttttaccggcagcagttgatccaccacgcggacaaactcggtgatgcacagatcgtagtcgttaacttcggtcagcaattcacgcaccagagagtcaagcactccctccatcggtgccagtaacacacgcatatcatcacccgcaaaaaaatgaggcgctatgttagcgcctatggtcagcggattaaaggtctgcaaagagggattgctgcaaactgcaatccctctctatgcttgatgtatgcctgagttcgctgcgcattgcgtaatgccggggagcgaaaaaataagcgctgatttcttaatgtgatcggtagcacgttttacgaattaattgtatgatgaatccatctcatctggggtgttgattatgagtaagacactgaacattatctggcaatatttacgcgctttcgtcctgatttatgcctgcctgtatgcaggcattttcattgcttccctgctaccggtaaccattccgggcagcatcatcgggatgctgatcctgtttgtcctgctggccttgcaaattcttccggcaaaatgggtcaatccggggtgctacgtactgattcgctatatggcgctattgtttgtgccgattggcgtaggcgtcatgcaatattttgatttgctccgcgcacagtttggcccggtagtggtttcctgtgcagtcagtacgctggtggtttttctggtggtgagctggagttcgcaactggtacacggtgaacgtaaagtcgtaggtcagaaaggatcagaagaatgatggcgaatatctggtggtcattaccgctgacattgattgtcttttttgccgcccgcaaactggcggcacggtataagtttcccttgcttaacccgttgctggtagcaatggtggtgatcattccttttttaatgctgactggcatctcttacgacagctactttaaaggtagcgaagtgctaaacgatctgctgcaaccggcggtcgtcgcgctggcctatcctttatatgagcagctacaccagatccgcgcgcgctggaaatcgatcatcaccatctgttttatcggcagcgtggttgcgatggtgacggggacttccgtggcattgttgatgggcgcttcaccggaaatcgccgcgtcaatcctgccgaaatcagtcaccacgcctattgcaatggcggttggcggcagtattggcggtattccggcaatcagcgcagtttgcgtgattttcgtcggcatcctcggcgcggtatttggccatacattgcttaatgcgatgcgtattcgtaccaaagctgcgcgcggtctggcaatggggactgcctcgcacgccctcggtacggcgcgctgcgccgagctggattatcaggaaggtgcatttagttcgctagcgctggtgttatgcgggataattacttcgctgatcgcaccgttccttttcccgattattctggcagtaatgggctaaaatttgcgatgcgtcgcgcatttttgatgtatgtttcacgcgttgcataattaatgagattcagatcacatataaagccacaacgggttcgtaaactgttatcccattacatgattatgaggcaacgccatgcatccacgttttcaaaccgcttttgcccaacttgcggataacttgcaatctgcactggaacctattctggcagacaagtacttccccgctttgttgaccggggagcaagtctcatcgctgaagagcgcaacggggctggacgaagacgcgctggcattcgcactacttccgctggcggcggcctgtgcgcgtacgccattgtcgaattttaatgttggcgcaattgcgcgcggtgtgagcggaacctggtatttcggtgccaatatggaatttattggtgcgacaatgcagcaaaccgttcatgccgaacaaagcgcgatcagccacgcctggttgagtggtgaaaaagcgcttgcagccatcaccgttaactacacgccttgtggtcactgccgtcagtttatgaatgaactgaacagcggtctggatctgcgtattcatctgccgggccgcgaggcacacgcgctgcgtgactatctgccagatgcctttgggccgaaagatctggagattaaaacgctgctgatggacgaacaggatcacggctatgcgctgacgggtgatgcgctttctcaggcagcgattgcggcggcaaaccgttcgcacatgccttacagtaagtcgccaagcggtgtcgcgctggaatgtaaagacggtcgtattttcagtggcagctacgctgaaaacgccgcattcaacccgactctgccaccgttgcagggagcgttaattctgttgaatctcaagggttatgattacccggatatccagcgcgcggttctggcagaaaaagccgatgcgccgttgattcagtgggatgccacctccgcaacgctgaaagctctcggctgtcacagtatcgaccgagtgcttctcgcttaagcctggtgccggatgcggcgtgaacgccttgtccggcttgccagccctctcctggtgtcgaaattcccggcaaacagtttgccgtttcttgcgcaaaaccagcgggtaaagtagcctgatggaaattttccttagatcgagtctcctgcatgttaaagcgcgtgttcctcagcctgttagtcctgatcggcttgctgctgttgactgtgctcggcctcgatcgctggatgagctggaaaaccgcgccttatatctacgacgaattgcaggatctcccctaccgccaggtcggtgtggtgctcggaacagcaaaatattatcgtactggcgtaattaatcagtattatcgctaccgcattcaaggagcgattaatgcctataacagcggtaaggtaaattatctattactgagcggcgataacgcattgcaaagttataatgagccgatgaccatgcgcaaagatttaatcgctgctggtgtcgacccatcagatattgttctcgattacgcaggctttcgtacgctggattccatcgtgcgtacacgcaaagttttcgatactaatgatttcattattatcacccaacgtttccactgtgagcgagcattatttattgcgctgcatatggggattcaggctcagtgttatgccgtaccgtcaccgaaagatatgctgtcagtacgtattcgtgaatttgccgcccgtttcggtgcgctggctgacctttatatttttaaacgtgaaccgcgttttttagggccgctggtccctattccggctatgcaccaggtaccggaagatgcgcaggggtatcccgccgtcacacccgaacagttacttgaattacaaaagaaacaaggaaagtagttatggatgtacagcagttttttgtcgttgccgtttttttccttatcccgatattttgtttccgcgaagcatggaaaggctggcgcgcaggcgcgattgataaacgggttaaaaatgcaccggaaccggtgtatgtctggcgagcaaaaaatcccggactctttttcgcttatatggtggcatatatcggcttcggaattttatctatcggcatgattgtttatcttattttctatcgttaatattcccctctccagttaattattgagaataattattacttcacctgataagctgcggatatcacattcctaaccgcagctatttgtgaatcttttcacagtttaaattcccccgcacgcttagccttaatatcagtacattattatttactaaacgctcgccttaattacctatagcattaaggaagatcacatgccgcaacaaaattatctggatgaactcactccggcttttacgtctttactggcgattaaagaagcctctcgctgtttattatgtcacgacgctccctgtagtcaggcttgcccggcacagaccgatccggggaaatttattcgctcaatctactttcgtaattttaaaggcgctgccgagacaattcgcgaaaataatgccctcggtgccgtttgtgccagagtgtgcccgacggagaaattatgccaaagcggttgtacccgtgccggtgttgatgctcccattgatatcggccgcttacagcgttttgttactgattttgaacaacaaaccggaatggaaatttatcagcccggtactaaaacgctcggcaaagtcgcgattattggcgcaggtcctgccggattgcaggccagtgtgacactgacaaaccagggttatgacgtcacgatttatgagaaagaagcgcaccccggtggctggttgcgtaacggtattccgcaattccggttaccgcaatcagtgctggatgcagagatcgcccgtattgaaaaaatgggcgtgaccattaagtgcaacaacgaagtcggtaacacactcacccttgagcagctgaaagcagaaaaccgcgcggtactggtcaccgtggggttatcaagcggttccgggctaccgctgtttgagcatagtgacgttgagattgccgtcgacttcttgcaacgtgcacgacaggcgcaaggcgatatcagcattccacaaagcgcattaattatcggcggcggtgatgtcgcgatggacgtagccagcacgctgaaagttctcggctgtcaggcggtaacttgcgtagcgcgtgaagagttagatgagtttccggcaagcgaaaaagagtttaccagcgcccgggagctgggcgtttcgatcatcgatggattcacgccagtagccgtggaaggcaataaagtcacgtttaagcatgtacggttatcgggcgaactgacgatggcggcagataaaattattctcgccgtcggtcagcatgccagactagatgcctttgcggagttagagccgcagcgtaacaccatcaaaacacaaaattaccagacccgcgacccgcaagtctttgctgctggcgatattgttgagggtgacaaaaccgtggtctatgccgtgaaaaccgggaaagaagccgccgaggcgattcatcactatttagagggagcttgctcatgttaacgaaagatctttcgattactttttgcggcgtgaagtttcccaacccgttctgcctctcttcttcgccggtaggcaactgctatgagatgtgtgccaaagcctacgacacaggttggggcggtgtggtgtttaaaacgatcggcttttttatcgccaacgaagtctcgccgcgttttgatcatctggtgaaagaagataccggttttatcggcttcaaaaatatggagcagattgctgaacatccgttggaagagaatctggccgccctgcgtcggctgaaggaagattacccggacaaagtattgatcgcttcgatcatgggggaaaatgagcagcaatgggaggagctggcgcgcctggtgcaagaagctggcgcggatatgatcgagtgtaacttctcctgtccgcaaatgacttctcatgcgatgggtagcgatgtcgggcaaagcccggagctggtagaaaaatattgtcgggcagtgaaacggggttccacgctgccaatgctggcgaagatgacgccgaatatcggtgatatgtgcgaagtggcgctggcggcgaagcgcggcggcgcagatggcattgcggcgattaacaccgttaaatccatcaccaatatcgatcttaatcagaaaatcggtatgccgatcgttaacggaaaatcgagtatttccggatattccggtaaagcggtaaaaccgatcgccctgcgcttcattcagcaaatgcgcacccatccagaactgcgcgatttcccaatcagcggtatcggcggcattgaaacctgggaggatgcggctgagtttttattgctcggcgcagcaacgttacaggtgaccaccggcatcatgcagtacgggtatcggatagtggaagatatggcaagcgggttgtcgcattatctcgccgatcagggatttgattcgctgcaggagatggtaggtctggcgaataacaatattgtcccggcggaagatttagaccgcagttatattgtctatccccgtatcaatcttgataaatgtgttggctgtggacgctgttatatttcctgttacgacggcggtcaccaggcgatggaatggagcgagaaaacccgcacaccgcattgtaataccgagaaatgtgtgggttgtctgctttgtggtcacgtctgcccggtgggttgtattgagctcggggaagtgaagtttaagaaaggcgagaaagaacacccggtaacgttgtaaaaccagagacgcatccggcatttggttcctgtcgccggatgcggcttgaacgccttatccggcctacaaaaccatacaaatcagtatgttgagcttattgtaggccggataaaacgcgccagcgttgcatccggcatttggctcctgttgccggatgcggcgtgaacgccttatccggcctacaaaaccacacagatcatgatgttatgtgcgtttatgaccgaatgcggaccacattcacatcatttcttacgcgcgtatttcagtgaatccagcgctacggcgaagataataatcgcccctttgatgatgtactgccagtatgggtttacgccgatatacgtcaggccatagttgatgacggtaaaaataattaccccggtcaccacgccaatcaccgtccccacaccgccgctgaacgatacaccgcctaccacgcacgccgcgatagcatccagctcatacataaagccgaggttgttggtggcagagccgatacgtccggcttctaacatcccgccaaaggcatagaacacgccagacaacgcgtagatcatcagcaggttcaggccgacgttgacaccagatacttttgccgcttccgggttaccgccaatggcaaaaatgttcttaccgaagcgggttttgttccacaacacccagacgaacgccaccgcaatcaacgcgtagaaggtgatgtaagagagacggaaactccccagcgcgacaaagccctgagcaaaggtagagaagccactgtcaaaaccagaaattggcgacgccccgacaaagtcgtaatagagcgagttgatgccatagacgatgatcatcgtgccgagcgtggtaatgaacggcgtcacgttgagataagcgataatcagaccgttgatcaaaccgatcaccgcaccaatggcacagacaatcagaataaccagcgcaatcggcatcgtcgccatttccgggaacactttgttggcgttatccatggactgcaataatgtcgcagccaccactgccgccagccctacctgacgaccagcagaaagatcggtcccctgggtgacaattaaccctgccacaccgagcgcgataataatacgcaccgatgactgggtgagaatattacttaagttcaacagacttaaaaatgttgggtcctggaaaataataatcgccagcaaaactaaaagaacgacgtaaataccgccctctttcaggtaagtaagaaaacttttcttatttaacgcactcatgggaagcccctaatcttaaaggtgcaaagacgcaagacgcagaatttcgttttgcgttgttgtttttgtatcgacaattccggaaacgagaccattgctcatgaccagaatacggtctgttatccctaacaactcaggcatttcagaggagataataataatccccttgcctttcttcgccagttcggcaattaactgataaatttcaaacttcgccccgacatcaataccgcgcgtcggttcatcgagcattaatatttctggttgcgttagtagccagcgaccaataatcaccttttgctgattaccaccggagagcgaaccaatttgcgtccgatgacccggcgtttttacccgcatcgaatcaatcacccactgggtatcgcttttcatccgcgagttatccagtaaaccaactttatttttgtagttgcgaatattggaaattaacgagttaaaaccaatatccagataggcataaattcccgttgagcggcgctcctcagttaccagtgcaaatccatggtttatggcttcgttggcattatggttattgatctgtttgccgtgcaacgttatggtgccagccgatttctcgcgaataccaaataacgtctcaacaatatcggtacgtttcgcccccaccagaccggcaataccgaggatctcccctttatgcagatcaaacgagacatcgcgaatcgacggctggcgcagtgacgtcaggttacgtacctcgaggatgacttcgcccggtttgttttctttgtcagggaaacgctggttaagagaacgcccaaccatcatggcgatgatcttgtccatcgtcagtcctgccagcggttcggtggcgatccactgaccgtcgcgcaatacggtaacttcatcacataactggaagatttcttccattttatgcgagatataaacaataccacagccgcgctcttttaatttacgaataatagtgaacagatgattgacctctttttcggttaacgaagaagtcggttcatccataatcacaattttcgcgttataggaaaacgctttggcgatttcgatcatctgcatttgcgaaacggataatgtgccgacgcgcgcacgcggatcgatatcaatatccagttcgtcaaaaatcgctttggtttcgcggtacattttgtcctgatcgacaaacatgcctttggtgggatatcgccccagccacatgttatccatcaccgaacgttgtaataccaggtttaactcctggtgtaccatcgaaataccattttccagggcttcttttgcagaatggaaatcgatctctttaccctggaataaaatggtgccggagtctttttgataaataccaaacaggcattttaataatgtcgattttcctgcaccgttttcccccattaatgcatggatagaatgtggccggacttttaaattaacgttatcaagtgccttaacaccaggaaaggacttgttgataccgctcatttccaacaagtattccccggaggacggagtcgttgagctgaccatataattttaccttgttggccatacaataagggcgcagtaatagactgcgcccaatcagtcttatttcttgctgaattcagccaggttgtctttatctacgccaacataaggtacgcggaccactttgttgtcgattttccagttggtgccatcagccgcacctttaccatcggccaggtttttcgccagatcaaaggtcgctttcgcctggttgttagcatcgttcagtacggtgcccgccagtgcaccggatttcaccagcgccagcgcttctggcagcgcatcgacgccaaacaccggaatgctggacttgttgtgtgctttcagcgcttcaaccgcgcccattgccatcgcatcgttgttggcgataaccacttcgattttgttggcgttcgggccagacagccaggcgtccatcttatctttcgcctgagcggtgtcccacattgcggtatctaactgtaactgttcagttttgatgcctttatcgttcaattctttaatcacgtaagtggtacgtgcttctgcatccggatggcccggttcacctttcagcagtacgaactgaatctgaccgtctttgttcagatcccaaccctgattcgccgcccagtgtttagcaatcaaatcgccttgaataatgccggactctttggagtcagtgccaacgtagtaggctttgtcgtagctatccagcgccttacgagacggttctttgttgaagaaaaccaccggcacgttttgcccacgcgctttctcaatcaccgtacccgcagctgccgggtcaaccaggttgattgccagtgccttcacccctttcgccagcaatacgtcgatctgatcgttctgcttggactggtcattctgagaatcattcatcagcagctgaacatctggcgcggctttcgcatcttgctcaatagccttgcgcactacagacataaagttatcgtcgtacttatagattgttacaccaatgcgagtatcagcagcgtgtgcagcggcaccgaataacatgctggccatcacagcagacagggttaacaccttcttattcatggtatctccggtttttcttatgcagggtagtgcttgagataaatgctcggcggggcagtagagttaatgaagtgttactgaacgccgaagctcactttttaaaattcgttcttccatgcccggtaacgctccagaaaacggctttaattgttgttatgacgctgttacctcggcaaaagtgattattcactgttacatacgggttacaacgttaaaacggtgcaatcatagctatcacattgttaagatactgtgaaatcactcacagattgaaagcggttacatcgcctgatttgttgagttagtgatcgccgccgcattctggcgtgttgcgacagaatggcgacgcactaacgtcggcataaaacagtggctggcacgaggatcaatattgcctgctgccccctgcaaggccagttcggtggctaatttcgccattgaagcaatgggataacgcacggtcgttaattgcgggtcggtgtaacgggcgatgggaatatcatcgaaaccgatgattgagagatgtaacggaatcgcaatgccattatcttttaatgctgtcagtgcgccagcggccatattgtcgttataagcaaatacagcggtaagttgtagattgcgccccagcagttcaaccatcgccgcctcaccgcccggcatgtccggcgtaccagcgccaatccagctttccggcggaataatatcctgctctttcaacgcactcatccagcctgctttacgcatggcgtcatcttcaatgccgtggctggaagaaagataaccaatacgttgatgaccgttattcagcaacatgcgcgtcgccattcgggcaccgctgagattatccaggcaaacgcaacgatgggcgtaccccggcacaacgcggttgattaacaccataccgggaatgttatccataaattgcgccagttcatcgtcactcaatgcttttgagtgaacaatcaacgcattacaacgctggcgaattaacacctcaatggcgtgacgctctttttccgcttcatgatagctattgccgattagcacgtatttctgatgctgctgagcgaccagatccaccgcttttaccagcgcgccgaaaaacgcatcagaaacgtccatcaccaccacgccaatggtgtcgctaacctgagttgccagcgcctgggcattggcgtttggccgataatccagctcactcacggctttcattactgcttcacgcgtgtcggcactgaccagcgtgctgttattgagcacccgggaaaccgttgccacagagacgccagcctgacgcgctacatcacgaatggtgatcatattcactacctgttatgagattgcagtaaatgactgcttgctggcggctattttgtcagcactgaatacaggacttcgtgaatcgagtcacagcaatggaaacggttacagccgttttgttaacgaatgtgatccagatcgttatcttgatgttttagatattgccggtccggcagcacgcaaagttaactgacgccagagccattccaccggcccctggcggaagtaacgcagccagataacagagaagaggatattcgccagccataccggaataacaaacgccagcagctccaggcggtcaaaatgcataaacaaaccgaggtggtaaaaaagcgtggtacaaatcagcgtttgcaatagatagttggtcagcgccatccgtccgacgcaggcgatcgcaagcaccagcttaaagcggctcaattgcggccagaagccataaaacagcgacgcatagccaatcgcctgaaacggcgcactcagttcccgcggcatttgaagtaagaaggcacaccagcgatacgcccagtccagctgccattgcagggcgatggcaggaaggttaatggtcaccccaatcgccaccagcacaaaaccagtacgacgatagtgacgtaagctgaactgccctttcagccagccgctgcgcatcagcgccgcaccaatgagcatcatccctgccagttgccagccatactgtgcgcccagtgccagtaaactgttgccaacaccatcggcacgataactgatcgcttcaacgccgccgtgaagcttccagtatttttcatacaaaatagccgatgcatccggcgtccaggcgcggctggtctggctgtcggaaatcagccccaataacagcaaaacgccaagccccaccagataaagcatgacgcctgtattaaacaggctttttaccgatggcgcatcgcgcaccagccgccagcagattaagcccaccagcccgtaagccagcaaaatatcgccgtcccagaacaataaaccgtgaataaagcccaacaagactaacagcgttaaccgcgactggatccagcgtctgccacggggcagcaacatttgcaggcccgcaccaaacagtagcgcaaaaagcgtgaggaatttcacctggccgatgagatcaagaaatgcccaagtccatgcatcccgcggcgtaatagcaccgtaccaggcgggattgagataagccgcctttggtagcccaaaggcgctgatgtttaatagcaggatccccagaatggcgacgccgcgaacaaaatcgagcgtgacgttacgctccatggttcctgccttttaatcagttgtgatgacgcacagcgcgcagaaactcgtggcgcgtattctgactggatttgaacaatccaccaagagaggtcgttgtcgtggcactggttgcatcgcggatgccacgcgccttcacgcagtaatgcaccgcgtcgatcgagacagccacgttattggtgcccagcagcgtttgtagcgcaataagaatttgctgcgtcagacgttcctgcacctgcggacgctgggcaaagaactgcacaatgcggttaatttttgacagaccgatcaccgaatctttcgggatataggccaccgtcgctttgccatcgatggtaacaaaatggtgttcacaggtgctggtcagagtgatatcgcgcacggtgaccatttcatcgaccttcattttgttttcaatgagggtgattttcgggaaattggcgtaatccagaccggagaaaatttcatcgacatacattttagcgatgcgatgcggcgtttccatcaaactgtcatcagccaggtcgagattcagcagctgcatgatttcggtcatatgaccagcaataaggcttttgcgcgtttcgttatccatttcatgcacgggcgggcgcagcggtgtttccagtcctcgcgcaactaacgcttcatgaaccagggccgcttctttactgagtgatggcatttatgatttctcctgcaggtgtgacgcctccgccctgcgtgggggcaaagttattaagctgatttacagcctgattattgtgcgtgaggcggcgcacataatccagtattcacagcgataattattgtaattgccgctgcctttcatcagcagatgttaaaacatcgttatgcaaatacggaagtgaaagttactcacagcacattgaataaacggtatgatgaagaaattgcaaacaacacaacaaggagccacgcatggaaatgctcgaagagcaccgctgttttgaaggctggcagcaacgctggcgacacgactccagtaccttaaactgcccgatgacgttcagtatctttctccctccacctcgtgatcacactccgccaccagtgctgtactggctttccggattaacctgcaatgacgagaacttcaccaccaaggcgggtgcccagcgggtagcggcggaactggggattgtactggtgatgccagacaccagcccgcgcggcgaaaaggttgccaacgacgatggctacgatttaggccagggcgcaggcttttatcttaatgccacgcaaccgccgtgggcgacgcattaccggatgtatgattatctgcgcgatgaattaccggcgctggttcagtcgcaatttaatgtcagcgaccgctgcgccattagcggtcactcaatgggtggtcacggtgcgctgattatggcgctgaaaaatccgggtaaatacaccagcgtttcggcctttgcgccaattgtgaatccgtgcagcgtcccgtggggaatcaaagcgtttagcagctatttaggtgaggacaaaaatgcatggctggaatgggacagttgcgcactgatgtatgccagtaacgcgcaggatgcgatcccgacgcttatcgatcagggcgataatgatcagtttcttgccgaccagttgcaacctgcggtactggcagaagccgcgcgccagaaagcgtggccgatgacgctgcgtattcagccgggatatgatcacagttactacttcatcgcctcttttatagaggatcacctgcgcttccatgcgcagtatttactgaagtgaaagtccgcccggttcgccgggcatcttctcatcagaagcgataatccactgccataaagtaacgacgtccgtcttcgttatagctgtagtcgtcacgactgagatccttgtcgccaaggttcagcacgcctgcgcgcagtttgacgtctttagtcacctgccaggccgcgccggtattccagatggtataaccgcccggtgttttagccgtcgcgctgtcggcgcgtttctgcccggtatagtgcccagaaacatagaatgaccagtcttccagcgccagcggtttccagtccagcgtaccgttagcagtatggaacggcagatcggatagcggtttgttttcgccgttgctgacatcacgaccatcgttgtaggtgtagttgatcgacagtttccattcatcgttgaacggaattttcagttcggtttccacgccctgaatacgagctttgttaacgttgtagtagctaaataccggtatgcgccgtccgttagcgcccgtctcaaaaccaacaaagttttggtagcccggtgcagcgttgacgtcagacgtacggctgatgctgatacgatctttcacatcgttacggaaaacggtaacgctggattcaaccccttccagccagccttcttcacccatgtagtaaagccccagctcccaactttcgctggtttctggtttcagatccgggctacccacaatcttacatgcgccacggcaggaattgctcgtccagtcagggctaagttgcaacagagaaggtgctttaaatgccgtcgcccagccccctttcaccgttacggtgtcggtggcgttataaaccaggtaggcacgcggactccagtgttcaccgtaggtttcgtgatcgtccatacgcacgccggtcgtcagcgccagcggctcgaagatccgccattcatcttccacaaacagcgcgtactggctggcagacgttttggagctggttcccccggtcaggttcaccgcatcgctaagtttgtcgtgacgccattcaccgccaaccgtgagaaactgattaatcgccgtcagcggcaacgtgtatttgccgtcgaccgtattgctttcggaagttatcgggctgctgttgccagggtttttgttctcgactttctcaccgtagtatttcagttcgctggtgccgtaatcccaacgcccattatggctgacggagtagttctggcgttccaggcggtttttgtccagcgagtcggaatcacgatcctgacggtcgaaaccgtatccggcagtaaaatcgtgattttgattcggtgtccaggcaaattcgacattgccgtcgcggctggagaatccttcaatacgcggcgtttctccggtatcggtggtcgttgagttttgcgggtcatccttttcacgttttgccaggctgccgtaagctttcattcccagcacaccatcaattaatggtccactggtaaagaactgaccgttataggtgtcaccgcgatcgcgatgttcctgaatggtggtatcgacggtaacggtacccgaccatttctgaccgatttttttggtgatgatattcactacaccgccgagcgcatcggaaccgtacagcgacgacatcgggccacggaccacttcaatacgttcgatggaatcgaccgggatccagttcagatcgaaatcattgtggcggaagacggcattgcgggagttcacgcgtttaccgtcgacgagaatcagggtatagctgctgtccagaccacgaatactaacgcccttacggttatccccttcgttcgtcagttgtacgccaggcacttctttgaggacatccttcagattctgtaccggttttcgctgcaggtcttcctgggtaatgacgctgatactggcaggtgcatctttaagattttgttccacggaagatgcagtgacaaccatcgtttcgccatcatcatcgaccgctaacacaggccatgcacaagaaatagcggacaaacacagcccgacccgtacgaaagggttcaacctaaacattccatatctccatgaggtaactacgaaaataaaatgggttatcgctcacatcttcttcacgtccccttgcgtacggcagcatcgcggtggacttattttttatgcaggtgatcatcccagaaagccggaacagcctctgatttgtcagccttttttgattgcggcgtaacgataatgcaaacgataacaattatcaatccaaatgttaaattttatatccgcatgatttgtcagggaaatggaattgaaaaagccctctcggttgagagggcttagcaaggaagggaggaaacttatttcttatcgttctgcgggaacttcatttcgctgtagcgtacgaagtgagttcctttaatcagcttgtagccgaaccaaataatcaggaacagcgggataccaatatacgttgccgctacgccgccccagtcaatagtatctttcaggaacgcttcgtagttctggcccaaagtgataatcagacacagaatgaatgcgaagatcggccccagtgggaagaaacctgaacggtacggcagatcgttaatgtcgtgtccctgcaatacgtaaccgcgacggaagcgatagtggctaatggcaatccccagccaggcgataaaacccgtcatcccggaggtgttcagcagccacaggtataccgtctggttgccaaacatggaggtcaggaagcacagaccggcaatcaccgtcgtcgcatacagcgcattacgcggcacgccaccacgcgacagtttagcgaaaatgcgcggcgctttaccgtcacacgccagggtgtacagcatacgagtagacgcatacataccggagttacccgctgacagcaccgccgtcagaataactgcgttcatcaccgccgccgcagagagcagacccgcgtgctggaacaccagggtgaacggactaacgctgatgtctttaacatcgttacgcagcaggctcggatcggtgtacggaataatcaggctgataatcaggatcgcgaacacatagaacaacaggattcgccagaacacctgacgtaccgcgcgtggaatgtttttcgccggatcttcggactcgcctgcagcaataccgatcagctcggttccctggaaagagaagccgacaatcatagctacgccgatcatcgccgcaaaaccaccagcaaacggcgcttcgccgattgtccagttgctccagcccgcaggctgcgcgcctttgaagataccgataatcatcagcacgccaacgatgataaagacaataactgtcgtgactttgatcagtgagaaccagtattccgcttcaccaaagccacgaactgagatgtagttcagcaggaagataacgccgaggaacaacgcactccagatccagcccggtgtatccgggaaccaccagctcatgaccagctgagctgcaaccaggtcaacggcgatagtcaccgcccagttgtaccagtagttccagcccagcgcgaagccaaagccttcttcaacatagttctgaccgtaagtggcaaacgaaccggaaaccggcatatatgcagccagttcaccgagactggtcatcaggaagtaaaccatcaggccaatcagcatatacgagagcaatgccccgcccggacctgcctgagaaatcgttgcgccagaggcaacaaaaagacctgtaccgatggaaccgccaatggcaatcatcgtcaggtgacgcgcctttaattcacggcgtaagcccggcgcttctgtggttttagtttcggaaaccatacaaaatgctatccatcttaaaaatgaggcgcgattgtagcagacgattggcaatccttccggcagaaatacacggttataagacaccttcatgatcgcccagggattataagtaaagcagccaatctcttttctggcgaatgcatgctgaaggcgctgcgtcacgaaatcgacacagcaccagcatgttcttgtacagcaacttaacgcggcacatttgcgggatcgcaatagtccagaaagcgccgtagcgcgttggaaaggtgtttttgccgatgatgtatacgccacaacgtacgcatcaggcgcggcagagggaccgcaacttcacttaatgtgcctgcctgcaattgatcttcaatcacacgtcgcgacaggcaactaattcccaacccatgacgcaccgcatgtttgattgcctcggagttacctaattccatcgccatctcaaacttcggtaaatgtgacagcaacagataatcgacaatctcccgcgtgccggaaccgcgttcacgcaggatccacggcgcagcggccagctgttctaaggtgaccggaccacgggccaacggcgaagtcggcgcggcgaaaaccaccagctcgtcttccagccacggttcagaaatgatttcagtgctgtggcacggtccttcaataaagccaatatcaacgcggaaatccagcaccgcttgcatcacgtcctggctattcccaacgctaagttcaatcggcaactgcggataatcatggcgataacgggcgataactgcaggcagaatgtagttaccgatggtactactggcatagatacgaatcgcgccgttgtcttcgcgaaacagttgttcgatttcaaccgcctgttcaagcaatgccaacgcacgcggatagagcagccgcccgtgttcattaacaaccagtcttttccccacgcgatcaaacagttgcacgccaagctgcccttccaggtcggtcaaggctgcgctcactgctgattgcgacaacgccagcatcaccgacgcctgggtggttgatccacttttcaatacttctgcaaaaacttccaactgccggagggtgatgtgcatagtcgcttaccacttataaagattaattataaatatataatcaattttatttttaaaccagttagtcgtaaccttatgcccggttaaaggagagggttatgacgaatatcaccttacagaaacaacatcgtacactgtggcattttattccggggttagccctgagtgcagttatcaccggggtcgccctgtggggtggttccattcccgcggttgcgggtgccgggtttagtgccctcaccctcgcaatcttgttggggatggttttaggcaacaccatctatccgcacatctggaaaagctgtgacggtggtgtgctgtttgccaagcaatatttattacgtctgggtatcattctttatggcttccgtctgacgttctcgcaaattgccgatgtcggtatcagtgggatcatcattgacgtgttgacgctgtccagtaccttcctgctggcttgcttcctggggcagaaagtgtttggtctggataagcacaccagctggttgatcggtgccggtagcagtatctgtggtgctgccgcggtactggcgactgagccggtagtgaaagcggaagccagtaaagtaaccgtggctgttgcaaccgttgttatcttcgggaccgtcgcgattttcctctacccggcgatatatccgctgatgtctcaatggtttagtccggaaactttcggtatctacattggttctactgtgcacgaagtggcgcaggtggtggcggcaggtcatgccatcagcccggatgcggaaaacgcagcagttatttccaaaatgctgcgcgtgatgatgctggctccgttcctcatcctgctggcggcgcgtgttaaacagctgtctggggcgaacagcggcgagaaaagcaaaatcactattccgtggtttgccatcttgttcatcgtagttgccatctttaactcgttccacctgttaccgcagagcgtggtgaacatgctggtaacgctggataccttcctgctggcaatggcgatggcggcgctgggtctgaccactcacgtcagcgcgctgaaaaaagctggggcgaaacctctgctgatggcactggtactgtttgcctggctgattgttggtggtggtgcgattaactatgtgattcaaagcgtcatcgcataaaccactacatcttgctcctgttaacccgctatcattaccgttttcctccagcgggtttaacaggagtcctcgcatgaaatacattggagcgcacgttagtgctgctggcggtctggcaaatgccgcaattcgcgccgccgaaatcgacgcaaccgcgtttgccttgttcaccaaaaaccaacgtcagtggcgtgccgcaccgctcacgacgcaaaccatcgatgaattcaaagccgcctgtgaaaaatatcactacacatcggcgcaaattcttccccacgacagttatctgattaacctcggacatccggtcactgaagctctggaaaaatcgcgcgatgcctttatagatgaaatgcagcgttgcgaacagctggggctttctttgctcaacttccaccctggcagccatctgatgcagatttcagaagaggattgccttgcgcgtattgccgaatccatcaacattgcgctggataaaactcaaggtgtgacagcggtgatagaaaacaccgccggtcagggcagtaacttagggtttaaattcgaacatctcgcggcgattatcgacggcgtggaagataaatcccgcgtcggcgtctgcattgatacctgccatgctttcgctgccgggtatgatttgcgtactccagccgaatgcgagaaaacattcgcggattttgcccgtactgtcggctttaagtatctgcgcgggatgcaccttaacgatgcgaaaagcacctttggcagccgcgttgaccgccatcatagcctcggtgaaggcaatatcggtcatgatgcgttccgctggatcatgcaggacgaccgtttcgacggcattccgctgatcctcgaaaccatcaacccggatatctgggcagaagagatcgcctggctgaaagcgcaacaaactgaaaaagcggtagcctgaagatgaataaccgggaaaaggagatccttgcaattttacggcgtaacccgctgattcagcagaacgaaattgcggacatgctgcaaatcagccgttcgcgcgttgcggcgcatattatggatttaatgcgcaaaggccggattaaaggcaaaggttacattctcaccgagcaggaatactgcgtagtggtggggacaatcaatatggatattcgcgggatggcggatatccgttacccgcaatcggcttctcatcccggtacaattcattgctcagcgggcggcgtgggacgcaacatcgcccacaatctggcgctgttaggccgtgacgtccatttgctttcagtgattggcgatgacttttatggcgaaatgctcctggaagaaacgcgccgtgccggcgtgaatgtctccggctgcgttcgtttgcatggtcaaagcacatcgacgtatctggcaattgccaatcgagacgatcaaaccgtgctggcgattaacgatacccatctgctggaacagttgacaccgcaactactgaacgggtcgcgcgatttacttcgtcatgcgggcgtggtactggctgattgcaacctgacagccgaggcgctggaatgggtctttaccctcgctgatgaaatcccggtgtttgtcgataccgtttcagaattcaaagcgggcaaaatcaaacactggctggcgcatattcacaccctgaaacccactttaccggagctggaaattttatggggacaggcgatcaccagcgatgctgaccgtaataccgcagtgaatgcattgcatcagcaaggtgttcagcaactgtttgtttatttgcccgatgagtcagtttattgcagcgaaaaggatggagaacaatttttgctgaccgcgccagcgcatacgacagtagacagttttggtgctgacgatggttttatggcgggcctggtatatagctttcttgaaggatacagtttccgcgacagcgcccgttttgcggtagcctgcgcggcaatttcgcgcgccagcggcagcttaaacaaccctaccctgtctgccgataacgcgctttcattagtgccaatggtgtaacaatgttgccggatgcgacgcttaacgcgtcttatccggcctacaaatcaggcaatttcagcaagtaaatgtaggcctgataagcttgcgcatcaggcaatgacactcaagctaaaccaataaagaacccggcaatggtcgcactcatcaagttggaaagcgtcgccgccgccagcgcccgtaaaccaagctgggcgatttccggcgcacggtgtggcgcaaccgcagaaaacgcccccaccaccaccccgatagaaccaaagttagcgaaaccgcacaacgcgaaggaaataatcgccacagttttagcatcgagagtgccagccgtttgcagatagggtgagaaattgagataagcgacaaattcatttattgccagtttctgtccaatcaaactcccggcaagattcgcatcactccagtccacacccatcacccacgccagtggagccagcaggtaacctaaaatggactccagcgaggcatgttcaaaaccaaaccagccaccaacgccgccgataataccgttaatcaacgcaattattgcaacaaatgccatcaccactgttgccacacctgcggcgattttcagcccggtcattgcccctgtcgcagcggcttcaataatgctttttggcggtgtttcggtgaaagagaggttattaaaggaaacctgcgaagattccgttgccgggcttaacaggcgggcaaacaagatcccgccagggatcgccattaatgatgccgccagcagatattccacaggcacgcccagtgcggcgtaaccaatcattgtcgaaccagcaatcgaggccatgccactacaaatcgctgtaaataattcattgcgattcagacgatcgataaagggtttgacgattgccggaatttcgttttgcccgaggaaaatggtggtgaccgcgacgaatgactcgatcttgctgatatttaatgctttctggaagataccgccgagaattcgaattaaaatccccatcacaccgatgtagtagagaatactcaccagcgcggtgacgaagataattgccggtaacaccctgaaaccaaagataaatcctgcaccatcaaataaggtatccattttcggtccgaccagagaaccgaagataaatgcgctacccgcgtcgctgtacgccatcactttatgcacgccaaaagcgactttttcagcgacccaacgccctggcggtaaccaaagcataatgccgccaatcacgacctgtaacactaacgccgcgccaacggtacgcaggctgatcttcttcttgtttactgacagtaaaaacgcaatcgtcagcaataccaccattcccagaacacttctcatgacatccatagtgattatctcttcatgtcatattgggcgacggctttctgcccatcagaaatagccaggcctgcatcttgcgataccggcccggcttgttatcaacacttaatgggttttgatgtagccgcgcacgcactcttcgactaatccccagaaccagtctgtatcaatagtgatgccgactttggtattggcgggcttgccaagaacgcccagctcgtcgcagacggtacgcccatagcaagggccactgttgacgtccacttcgacgtacatctcctgggttttaatgccatcagggttaatcagataaccgatgcaggtggcgtcgtgcaccgggccgccagcaaggccgtagttttcgaactgcgttttgagagtgaagttcatgatgtcgctgaacagctctccggcggggccgcctgccctttccatccgagcaatcacgtccggggtgcaaacggtctggttggtgagatcgaggcccatcatcactaatggaacgccggaggtgaacactacgcgtgcggcttccgggtcggcaaagatgttgaactcggcagatggcgtgaagttgcctgtaccgtaagcgccgcccattagcacaatttcacggattttgggcaggatcgcgggttgcatacgcattgccaccgcgatatttgaaagcggaccaaccggcaccagagtgatatcgccatcgcttgccatcagggtatcaatgatatatttcaccgcatgagtgctttctgcctggcgggtcagcggctcgaataccgggccatccagtccggtttcaccgtgaatattatcggcaacgatttgttgacgcataatgggctgcggcatccccgcataaaccggaacattaatctccagtttctggcaaacattcaggccattaattaatgttttatcaagcgtctgattacccgctacaatagtgatgcctaataaatctattgccggatgtttcgccgccatcattatagcaatagcatcatcatgacccggatcacaatccagaataatttttctcttttccattgtttatttcctctgtttccagttgcgttattttttctacagcaaagaaaattcgaccgggccgatgattgaatcttaacaacagcgtacgtatgctaaatatgagaaatctcatagcggataaacatcgtgaaagaaatccacaataatgatcttaagcagcaattgatgagtgaatccgcgtttaaggattgctttttaacggatgtttcagccgatacgcggctgtttcattttttagcgcgtgactacattgtgcaggaagggcaacagccgtcctggctgttttacctgacgcgaggccgcgccaggctttacgccacgctagctaatggtcgcgtgtcgctgatcgatttctttgccgccccctgttttattggcgagattgagttaatcgataaagaccatgaaccgcgtgcggtgcaggctattgaagagtgttggtgccttgcgctccctatgaaacattaccgtccgctgttattaaacgacacgctatttttacgaaaactctgcgtcaccttaagtcataaaaattatcgtaatattgtttctttaactcagaatcaatcatttccgttagtgaatcgcctggcagcatttatattactctcgcaggaaggtgatctttatcacgaaaagcatacgcaagcggcagagtatttaggcgtttcttatcgacatcttttatatgttctcgcgcagttcattcactacggtttattaattaaaagcaagaaagggtatctcattaaaaacagaaagcagttgtcaggactggcgctggagatggacccggagaataaattctccgggatgatgcagtaaaaattattttcaatagcgcgattgccggatgcaacgcttaatacgttttatccggtctacaaatcgagcattacgccagaccaataaagaacccggcaatagtcgcactcatcaggttggaaagcgttgctgctgccagcgcccgtaaaccaagctgggcgatttccggcgcgcgttttggcgaaatagccgaaaatgcgccaacgacaacaccgatagaaccaaagttagcaaaaccacaaagcgcaaaggagataatcgcaatggttttcacttccagcgtgccgcccgtttgcaggtatggggagaaactcaggtaagcgacgaattcgttaatcgccagtttctgcccaatcaggctacccgcaagattggcatcactccagtccacacccatgatccacgccagcggtgccagcacatagccaaaaatactttccagagaggcattggcgaaaccaaaccagccgccaattccgccgataatgccgttgatcagcgcaataattgcgacaaacgccattaccaccgtcgccacaccagcggcgatttttagcccggtcatcgcaccgctcgccgccgcttcgataaagctttttggcggcgtttcgctgaacgacagattttcaaatgtgacctgcgaaggctcggttgccgggctaagaatacgtgcaaacaaaatcccgccagggatcgccatcagcgatgccgctaacaggtagtcaattggtacgcccattccggcataaccaatcatcatcgaaccagcaatggacgccatcccgctacaaattgcggtaaacaactcgttgcgattcatgcgatcgataaacggtttaacgatcgccgggatctcattttgcccgaggaaaatagtagtaaccgcaacaaaagattcgattttgctgatgttgagggctttctggaaaatgctgccaaggatgcgaatcagcagccccatcacgccaatgtagtacagcagactgatgagcgcagtaacgaaaataatcgccggaagtacgcgaaaggcgaagataaaacccgcaccgtcaaacaggacatccattttcggcccaaccagcgaaccaaaaatgaaggcgctaccggcatcactgtaagacatcactttatgaacgcctaatgccgcctgttctactgcccattttcccggtgggaagtagagcatgatgccaccaatagcgatttgcagcagcagtgcggctccaaccgtgcgcaaactgatgctctttttattcactgacaacagaaatgctattgccagtaacaccaccatccccacaacacttctcattatatccataatgattttcccttcatgccggtaaacccggcgtcagcgccaggttttggtatgcttgatgagtacgggcgacggctttctgcccgtcagaaattaacccgcgagacgctgatattctttggcaatttcgctcgccagaatggcgttgttgaacaccagctggatgttggatttcaggctgtcaccgccggtcagttcagcaacgcgcgccagcaggaatggcgtactttctttaccaatgactccctgagcttcagcttcagctaccgcctgatcgatcgccgcattgatagtgtgttccggcatagcaaactgttccgggatcgggttcgctaccacgaggccaccgttcagaccgctttgccatttcaccgccattgcacgggcaatttcgctggcgctgtcgagacgaatgctgacgtcaaacgggctggtgcggcagaaaaacgcaggcagcgctttagtctgatagccaattaacggcacaccgaaggtttctaaatactcagtggttaatcctaaatcgagaatagatttcgccccggcacaaacaacggtgacattagtatttgccagttcttgcaaatcggcagaaatatcgaaggtatgttccgccccgcgatgcacaccaccaattcccccggtggcaaatactttaattccggcaagcgccgcaataatcatcgttgaagccacagtggttgcgccattttttccggcggcaacaacaaaaggtaaatcgcgacgactaactttggtcacgttatgcccttcacgacccagtaattcaatttcttctttgcttaaccccactttcatcacgccgccaataatggcgatcgtggcaggtacagcgccctgtttacgaatagtttcttcaacttcaattgcggtctgggcattttgtgggaacggcatcccgtgagaaataatggtcgattccagcgccacaaccggttttttgttttttaaagcgtcctgcacttccggggaaatttgtaataattcaggggaaatttttaattcagacattctgcgttctccactaacgatataacgttggcaatcgataaatcggggttattggtgtattcacaggagagcgccattgacgaacatccctgtgcgaaacgaacagattcggcaaacggcattccgtctacccaacacgaagcaagtcccgccatcatggcatcgcccgctccggtaacattaataacattggttttgatcggcgcagaccagccactttcaccgctgatatcgctgtaataaacgccgtcgccgcccatgctcaataccagtcggttcaggccatgttgatggaaccaggcagcaacttttgccacatcttcacgccctgacagcgcaatcccactcagggtttccgcttcaaggcggtttggcttgagagtgtggatctgatttagacggtcgcgcactttgacacatttccatgccgaaaccggatcgacaaatacgggtacgttggcggcattatccagaatccatgccagtgcctcttcactgatattacagtccgcgacaatgacctttgccctctgaataaattcaccgtgctgtgcgagatattcagctgtaatagcgttgctaatattcatgtcatttatagcaaccagcatttcaccggtattatcgagtaatgataaataactcgacgtattttctcccggcacaatcaggcatttatcgacataaacgccagattgattggtttgcgttagcagcgattgaccataaaaatcactgcctacggcgctcagtagccaggctttgttacccagcaacgccaggttttgtgcaatattgcgccctactccaccaggcgtaaattttattttacctggatttgaatccgcataatttaatgattcatgtgaatatccggcgacatcaatattcgccgaacctataattacgacataatccttttcgcgcatagcacgtcctctggtaaaaaattaccaaccctgtcaatccacaagaatatagatactgcaaagacggtttaaacatgtgttcatatttaaacatgtgctcatagtatgcatgttttacgtaaagtaaattaccgccagagaggcaaaatgggcagatttgagcaggctcacaaaatgcgattaaatgcctgaattacaaaagcgaggaatttgtgacgggatgcacagaacagaacaataaaaaagggcagaaaataatctgcccttgaggaaataacctgagtgtttgatgaacgtttgaagtttctactgaaagataaaaccatttaaattcataaaattacattcacaaaccggtcattctctttgcgctcatcaaatgttacaggacaggaaatttctgccctgtaacacaccttttattacgctgctttcgctactgcgtccacttccggacgtttcaggaaggcataggccaaacccgccaccagcgtaccggcaataattgctaccaggtaacccaataccggcgtaatagcgccagggatcagcagaacaaacagaccaccgtgcggtgccatcagtttcgcaccaatcgccattgagattgcgccagtcagcgccccacccacgatacagcacggcagcacacgcatcggatcacgagcagcaaacggaattgcaccttccgaaatgaagcacagtcccaataccagagcggctttgccaccttcctgctgcgctttgtcgaatttgcgacgcgccaccattgttgccagacccattgccagcggtggcaccatacctgccgccataatcgccgccatcgggccataggtttgagtactcagcagacccacaccgaatgcgtacgctgctttgtttaccggaccgcccatgtcagtacacatcatgccaccgaggatcgcccccagcagaaccgcattcgcagtccccatggtctgcagccagtgagtcagcccttcgagaatgccagcaactggtttaccgatcaggtagatcatcgccagaccgaccaccagactggaaattagcggaatgatcaggatcggtttcagcgcctccatactctgtggcagtttcaattgcgtactgattaacttcgcaatgtaaccagccaggaagcccgcaataataccaccaatgaagccagaaccggtgctgaccgccagcataccgccaatcagacccggagtgaggcccggacgatcggcaatggaaaaggcaatataacctgccagtaccggcaccatcagcgcaaaggctgaaccaccaccaatctgcatcagcgccgcagccaacgtacccggctctttaaacgcttcgataccaaaagcaaaagaaagcgcgatacacagaccacctgcaacgaccatcggcagcatgtaagaaacgcccgtcagcaagtgacggtatgcgcctgcactctctttcttactttcagtggtcgccgtttgagctttgcccgccggttcatacggcgttgcttcagcaaccgctttatccagttcctgcgcggttttcttcagcgccagaccggtagaggtacgatacatcggtttaccagcaaatttcgccagatccacttcgatatctgccgccacaatcaccagatccgctgctgcgacttcttcgggagtgattgcattacccgcgccaacagaaccacgggtttcaactttcacccaccagccacgttttttcgcttcggtttcaatggcttcagccgccataaaggtgtgtgctacgccagtcgggcaagcagtcaccgcaactacgcgtttcggaccgctggcggcaactggtgctgtcgcagcgaccggcgcagtgtaaggtttcgcatggcctttggcttcactcaggaacagctcagggtgcgcaactgcccgggaaatatcgcccagccagacatttttaccgttcagcgcgctgtcgttcgggatggaatcaccgagaacaatcgccatttcagcgtcgttcggattgtcgatgatttccagttttgcttttcgcgccgccgcgcccagcagggtcttcgccatataggcgcgtgcctgaccgagattagcgtcaataatcagcagcgttttcattatgcctctcctgctgtcagttaaaaggttgtaagtcgacgcgcgccatcattgcggccaactgcggacgatcggtaatacccacattgctttgacttaccgccagggctgcaacagctgtcgccagacgcagtgtgtgttcactggattcacgcatcagcaagccataaatcaggccaccaaccatagaatcccctgcgccaacggtgcttacgacatcgactgacggtggtttggcgatccattcgccggaggcattaacccaaagcgcgccttcggcacccagtgaaataacaacatgcgcgatgccttgttcacgtagcgcatgtgcagcttcaatcacatctttcatttcaggcagtttacggcctgcccagatttccagctcgcggcggttaggtttcaccagccacggtgccgctttcaaacctgctactaacgcttcacggctactatcaaagataatgcaaggacactgactacgcaggcgagtcatccagtcggtgaacgcttccgggctgacgcctgacggtaagcttccgctgacacagaccatatcgaactgaccgagccagctcagagaatcagtcacaaagcgttcccagtcggcgggggtgacttcaaaacccgagaagttgaagtcggtcacttcgccgtctttttccgtcagcttaacgttaattcgggtgcgcccctgtacaacctggaaacggttggcaatgcccagctcgctgaacagttgctgaaaaccatcctgattgtctttacccaggaagccgccaacggtgacatcaattcccaggtcttttaatactttggccacgttgatgcctttacccgccgcatgcagaccggtggttttcaccaggttcacttcgccgcgttcaatttccgggcagaaaccaacaaggtcataagccggattaagggtgatagtagcaacacgtctgctcattatgcgccctccccaagaccagcagcgatagcgtcgccgattgctttcagcgcctgttcagcatctgcaccctgggcggtaaagcgtaggcgatgacctttcttaacgccaagtgccacaactttcatcagactacgtccgtttgccggtttgccggtaccatcaaggtttgtcacggtaatatcactgttaaattgtttaatggtattgaccagcatggtacctggacgagcatgcaggccgtgttcattgcgcaccacaaactccgcgcttaacacgtcgtcggtcggcgcatcatcgctggtcagcagcgccagcaacgttgccgcatccgctttcagcaagcggtcagctttattgtcgagcaataaatcagcgagacgcttaagaaccgcgatgggctgatcgtcattcatcgccacactcaccagcatggctgccgtttcgccgtccacatcaaaagcatttgccgcacggcttaccgcaatcgcgctacgcagattgccttcggcgctatcgctcagccagataccctgtccgagattcagcggttgttcattgatggctttggtgacgaaagtggcgtcaactgcccccgcctctttcagacgcgcagcgttcagcgcctgaagagtcagcagatcgctggcgacgatatccagtgtcagcatttcgttgtcgagcttcagctgctcactctgcttttcgcccatcagtaatgcgcgaagttcttctgctgttgttgctgacttcagttgttcagcaacggaatcatcgctcagtacgtgggtcagctggcgtagcaggcccagatgttcatccgagctggcagcaataccgattgccacgtacgctacctgaccgtcaccccaggtgacgccttccgggaactgaaatacctgaacgccggttttcagcacctgatcgcgggtgtcggtagtgccgtgtggaatagcaataccattgccgaggaacgttgaggtttgctgttcgcgcgccagcatgccattgacgtagccttctgctacattaccggcctgcaccagcgccgcagcgacctggcgaatcgcctcttctttgtctccggccttttcgcccggatggatgtcctgtacggataactggaacatagttctcctctcttgctgaattgaaacgattcagcctctatgagaaaaaagcgccaacctggcttagggttaaagacaagatcgcgctgaaacgtttcaagaaagcataatacttctgtttcagcacgcaaggaaagccgtaaagttatgagcaaaagtttgatgtgctgcacaattttttgccatttttcctaattgctgatgggaaaatccgttatcagcaatttcatttcagcagcgtcagcagccaatcagcaacagtgaaatggcattttgactattcgtggcgcttttgatttcgctgtctgtttattttctgacaagcagcgtaaactccgcgtcttcctcttccagtgatcgaccagcatgcataactcccccgcagtctccagcgcgaaatcgtttgacctgacctcgacggcgtttttaatcgttgcctttctcaccggtattgcgggcgctctgcaaaccccgacactcagtatttttcttaccgatgaagtacatgcccgtccggcgatggtgggattcttctttaccggcagcgctgtcattgggattctggtaagtcagtttctcgccgggcgctctgataagcgcggcgatcgcaaatcgctgattgtcttttgctgcctgttaggcgtgctggcctgcaccctttttgcctggaatcgcaactactttgttttgctattcgttggcgtctttcttagcagctttggctcgaccgctaacccgcaaatgtttgcccttgcccgtgaacatgccgacaaaaccggacgtgaggcggtgatgttcagctcttttttacgcgctcaggtttcactggcatgggtcattggcccaccgctggcttatgccttagcgatgggtttcagctttacggtaatgtatctgagcgcagcggtagcgtttattgtttgcggtgtgatggtgtggctgtttttaccgtcgatgcaaaaagagcttccgctggcgaccggcacgatcgaagcgccgcgccgtaaccgtcgcgatacgctgctgctgtttgtcatttgtacattgatgtggggctcgaacagcctgtacatcatcaacatgccgctatttattatcaacgaactgcatcttcccgagaaactggccggtgtgatgatggggaccgccgccgggctggaaatcccgacgatgttgattgccggatatttcgccaaacgtctgggtaagcgtttcttaatgcgcgttgctgccgtgggtggcgtctgtttttacgcaggaatgctgatggcgcattcacctgtcattctgttgggcttgcagctgctaaatgctatttttattggcattctgggcggcatcgggatgctctattttcaggatctgatgcccggtcaggcgggttcagccaccacgctctataccaacacttcgcgcgtgggctggatcatcgcaggatcagtggcgggcatcgtcgccgagatctggaattatcacgctgtgttctggtttgcgatggtgatgattatcgccactctgttttgcttactgcggattaaagatgtttaaggcgcggtcagcatttccagatcgataagccaggtcatggcctgctgacgcgagttaccgcacatttcagcgctggcttgtaagcctgcacagactttcggtcgcagtggcgaggtgaaaattttacagcgttgctgttcatcaagctgaatgcagggcgtattggcgggcttgccatctggcataccgggaatagggctggaaattgaaggggcagtgcaacacgccccgcaacccggacggcattccatacgttgttctcttaaggttaaccaccggattgatgagcgcgcacagtaccaccttttttgcaccagcaaaagtgcgaataccacttgcccgaaaggcccgtcgcgagtactttgtcgcgatatttttgacattttcgactacaggaatttttcgatgccaagagcgaacgaaattaaaaaaggtatggtactgaattacaacggcaaactgctgctggttaaggatattgatattcagtcgcccactgcccgcggtgccgctacgctgtacaaaatgcgtttttctgatgtccgtaccgggctgaaagtagaagagcgtttcaaaggtgatgatatcgttgacaccgtgacgctgacccgccgttacgttgacttctcctatgtcgatggcaacgaatatgtctttatggataaagaagactataccccgtataccttcaccaaagatcagattgaagaagagttgctgtttatgccagagggcggcatgccggacatgcaggtgctgacctgggacggtcaactgctggcgcttgagctgccgcagaccgttgatctggaaatcgttgaaaccgcaccaggcatcaaaggggcatctgccagcgcccgtaacaaaccggcgacattgagcactggtctggtgattcaggtaccagaatacttaagcccgggcgaaaaaattcgtatccatatcgaagaacgccgttatatggggcgtgctgactaacttcagccgcatgcagaaaagggatagctcaggctgtcccttttttaatttattataccaatcttctattttgcgcttcctgaacaccttacgccctcaattttcactcgttgattgatcgccctcacacttcatcgcattaacaatccagaccaatttcaattgctgtcatataactttacactgtcgttgttaattaatcgttactaagacgtgactcctatgaatacaatcgcctccgttacgctcccgcatcatgtacacgctccacgctatgatcgccagcagttgcaatcacgtatcgttcattttggctttggagcctttcaccgcgctcatcaggcgttactgaccgatcgtgtgctgaatgcccagggcggcgactgggggatctgtgaaatcagcttgttcagcggtgatcaactgatgagccagctccgcgcacagaaccatttatataccgtgctggagaaaggtgcggacggcaatcaggtgataattgtcggtgccgttcacgaatgccttaatgcaaaactggattccttagcggcaattattgagaaattttgcgagccacaggtggcaattgtttccctgacgattaccgaaaaaggctattgtattgacccggccaccggtgcactcgacaccagtaatccgcggattattcacgatctacaaacccctgaagaacctcactccgcaccgggtattctcgtcgaagcactgaaacgccgccgtgagcgcggccttacaccgtttaccgtgctctcctgcgacaatattcccgacaatggtcatgtggtgaaaaacgcggtgctgggaatggcagaaaaacgttcgccagaactcgccgggtggataaaagagcacgtcagttttccgggaaccatggtcgaccgcattgttccggctgcaaccgacgaatcactggtggaaatcagccagcatctgggggtgaatgatccctgcgcgattagctgcgaaccgtttatccagtgggtggtggaagataacttcgtcgctgggcgtcctgcctgggaagtcgcaggtgtacaaatggtgaatgatgtcctgccatgggaagagatgaaactgcggatgcttaatggcagccactcttttctcgcttatctgggttacctctcaggattcgcccatatcagtgattgcatgcaggatcgcgcatttcgccatgccgccagaacattaatgctggatgagcaagcgccgacactgcaaattaaagatgtcgatttaacacaatatgcggataagttaattgcacgttttgctaatccggcgctgaaacataagacctggcaaatcgcgatggatggcagccagaaattaccgcaacgcatgctggcaggtattcgcatacatcaggggcgcgaaacggactggtcgttgctggcattaggcgttgcaggctggatgcgttacgtcagcggcgttgatgatgccggaaatgccattgatgttcgcgatccgcttagcgataaaattcgcgaacttgttgcgggcagcagcagtgaacaacgcgtaaccgccctgctttccctgcgtgaagttttcggtgatgatctgccagataacccgcattttgtgcaggccatcgaacaagcctggcaacaaatcgtacaattcggcgcacatcaggcgctattaaacaccctcaaaatttaacgatttctgcggttaaagcggatgaagctcaccttcgtccgctctccccttctcttttctgccttttttagccaggattaacgctcagttaacttaccagagtattgcggagccgttgtgaccaggaccaacctcatcaccggttttctcggcagcgggaaaaccacgtcgattcttcatctgttagcccataaagatcccaacgaaaaatgggcggtactggttaatgaatttggggaagtcggaattgatggtgctttgctcgccgatagcggcgcattgctgaaagagatccccggcggctgcatgtgctgcgttaatggtttacccatgcaggtagggttgaataccttactgcgtcagggaaaaccagaccgcttgttgatagagccgaccgggctgggccatccgaaacagatcctcgatctgttaaccgcaccagtctatgaaccgtggatagatctgcgcgccaccttgtgcattctcgatccgcgcttgctgctggacgaaaaaagcgccagcaatgaaaacttccgtgaccagctggctgccgcagacatcattgtcgccaataaatccgaccgtacgacgcccgaaagtgagcaagcgctacagcgttggtggcagcaaaatggtggcgatcgacaattaattcacagtgagcatgggaaagttgacggtcatcttctggatttgccgcgtcgcaatttagccgagttgcccgccagcgccgcgcattctcatcagcatgtcgtgaaaaaagggttagcagcgttaagcctgccagagcatcaacgctggcgtcgcagtctgaacagcgggcaaggatatcaggcctgcggctggatattcgacgctgatacggtattcgacaccattggcattctggaatgggcgcgacttgcaccggtggaacgcgtcaaaggcgtgctgcgtattcccgaagggctggtgcgaatcaaccgtcagggcgatgacctgcacattgaaacgcaaaacgttgcgccaccggacagccgtattgagctgatttccagcagcgaagctgactggaatgccttgcagagcgcgctgttgaagcttcgtttagcgactaccgcgtaaggttgcctgcgtttttcagtaagataattagagaaaatatgattaaaaatttgccgcaaatagtgttgttgaatattgtcggcctcgcgctgtttctttcctggtatatccccgttaatcatggattctggttgccgattgatgcggatattttttatttctttaatcagaaactggtcgaaagtaaggcctttttgtggctggttgcattgaccaacaatcgcgccttcgacggttgttcactgctggcgatgggtatgttgatgctgagtttctggctgaaagaaaacgcccctggcagacgacgtatcgtgattattggtctggtcatgctattaactgcagtggtattaaaccagctgggtcaggcattaattcctgtaaaacgggccagcccaacattgacttttaccgatattaaccgcgtcagcgaactgctctctgttcccacgaaagatgcctcacgagatagctttcccggcgatcacggcatgatgctgcttattttttcggcattcatgtggcgttatttcggcaaagttgcaggccttatcgcccttattatttttgtggtttttgcatttcccagagtaatgattggcgcacactggtttactgacatcattgtcggttcgatgaccgtgatattgatcggtttgccctgggtgttgctgacgccattaagtgatcgattaatcaccttttttgacaaatcactaccaggaaaaaacaaacatttccaaaacaaataactcacagtaattaacatcatcagggttatttttatagtgaggataatcctgatgatgcgcaccgtgctttcatctatcgaacgcaaaaatcattctctaagtaaatgaatggattgcatgcgtttcactcaattgtactttaattgaccaaccccgcttattaactttctgtatcactttttcttataaaaaatcatgtaaaaccgctcgccaagaccgcaccaatcgggtaatctcgaactcgttttgcctcggcggtagattatcctcacagcatataattttgtgcgttagtccacagatttggccttaaggaattgtttcaacatgcccaggtaattagtctcgtgtcgcttggcatttttttataacgatatttgtcgttaaggacttcaagggaaaacaaacaacatggtcaaatctcaaccgattttgagatatatcttgcgcgggattcccgcgattgcagtagcggttctgctttctgcatgtagtgcaaataacaccgcaaagaatatgcatcctgagacacgtgcagtgggtagtgaaacatcatcactgcaagcttctcaggatgaatttgaaaacctggttcgtaatgtcgacgtaaaatcgcgaattatggatcagtatgctgactggaaaggcgtacgttatcgtctgggcggcagcactaaaaaaggtatcgattgttctggtttcgtacagcgtacattccgtgagcaatttggcttagaacttccgcgttcgacttacgaacagcaggaaatgggtaaatctgtttcccgcagtaatttgcgtacgggtgatttagttctgttccgtgccggttcaacgggacgccatgtcggtatttatatcggcaacaatcagtttgtccatgcttccaccagcagtggtgttattatttccagcatgaatgaaccgtactggaagaagcgttacaacgaagcacgccgggttctcagccgcagctaataaaccgtttggatgcaatcccttggctatcctgacgagttaactgaaagcactgcttaggcagtgcttttttgttttcattcatcagagaaaatgatgtttccgcgtcttgatccaggctatagtccggtcattgttatcttttaaatgttgtcgtaatttcaggaaattaacggaatcatgttcatacgcgctcccaattttggacgtaagctcctgcttacctgcattgttgcaggcgtaatgattgcgatactggtgagttgccttcagtttttagtggcctggcataagcacgaagtcaaatacgacacactgattaccgacgtacaaaagtatctcgatacctattttgccgacctgaaatccactactgaccggctccagccgctgaccttagatacctgccagcaagctaaccccgaactgaccgcccgcgcagcgtttagcatgaatgtccgaacgtttgtgctggtgaaagataaaaaaacattctgttcatctgcgaccggtgagatggacattccactcaatgaattgattccggcgctcgacattaataaaaacgtcgatatggcgatcttacccggcacgccgatggtgccgaacaaacccgcaatcgtcatctggtatcgcaaccctttgctgaaaaatagcggcgtctttgccgctctgaatctcaacctgacgccttcactcttttatagttcacggcaggaagattacgatggcgtcgccctcattattggcaatactgcgctatctaccttttcttcacgtttgatgaacgttaacgaattaaccgacatgccagtccgtgaaactaaaattgcgggcattcctctgaccgttcggctttatgcagatgactggacatggaacgatgtgtggtacgcatttttactgggcggcatgagtggaactgtcgttggcctgctctgctattacctgatgagcgtacgtatgcgccccggcagagaaatcatgaccgccatcaagcgcgaacaattttacgtggcgtatcaaccggtggtggatacacaagctttgcgagtaacgggcctggaagtactgctacgctggcggcatcctgtcgcgggagaaattcccccggatgccttcattaactttgccgaatcgcaaaagatgattgtgccgctgactcagcacctgtttgagttaattgcccgcgatgccgcagaattagaaaaagtgctgccggtaggcgtcaaatttggtattaacattgcgccggaccatctgcacagcgaaagctttaaagcagatatccagaaactgctcacttccctgcccgcacaccatttccagattgtgctggaaattaccgagcgcgatatgttgaaagagcaagaagccacacaactcttcgcctggctgcactcggtcggcgtagaaattgctattgatgacttcggcaccgggcacagcgcgcttatctatcttgagcgttttacgctcgattatctgaaaattgaccgtggatttatcaacgccatcggtacggaaacgatcacttcccccgtacttgacgcggtgctgacgctggcgaaacgcctcaatatgctgacggttgctgaaggggtcgaaacgccggaacaggcgcgatggctaagcgaacgcggcgttaatttcatgcaaggctactggattagccgcccgttaccgctggacgattttgttcgctggctaaagaaaccgtatacgccgcagtggtaaggtgtgcttacgtcccttattattcatagtgaaagcatgccggattgcggctaatgatgagtaaaaggaaatccgttgcagatgattgtgcgcatactgctgctgtttatcgctctgttcacctttggtgtgcaggcgcaggctatcaaggaaagctatgcctttgccgtgctgggcgaaccccggtacgcgtttaatttcaaccattttgattatgtgaaccccgccgcgccaaaaggtgggcagataacgttgtcagccctcggcaccttcgataatttcaaccgctatgcactgcgcggcaacccgggcgcacgcaccgagcagctgtacgacacgctatttacgacttccgatgacgaaccaggcagttattacccgctgattgctgaaagcgcacgctatgctgacgattattcctgggtggaggtcgctattaatccgcgcgcccgttttcatgatggttcgcccattactgcccgcgatgtagagtttacttttcaaaaatttatgaccgaaggcgtgccgcaatttcgtctggtctacaaaggcaccaccgtcaaagccattgcaccgttaaccgtgcgcattgagttagctaaacccggcaaagaagatatgctgagtctgttttcgctgccggtatttccagaaaagtactggaaggatcacaaacttagcgacccgctcgccacgcctccgcttgccagtggtccgtaccgcgttacgtcctggaaaatggggcaaaatattgtctattcccgtgtgaaagattactgggcagcaaacttaccggtaaaccgtggacgctggaatttcgacaccattcgctacgattattacctcgatgataatgtcgcctttgaagcgtttaaagcaggtgcctttgatttgcgtatggaaaacgacgccaaaaactgggccacgcgttataccggtaaaaatttcgataaaaaatacatcatcaaagatgagcaaaagaacgaatcagcccaggatacgcgttggctggcgtttaatatccaacgtccggtattcagcgatcgccgggtccgggaagctatcactctcgcctttgactttgaatggatgaacaaggcgttgttttacaatgcctggagtcgcacgaacagttattttcagaataccgaatacgcggccagaaattaccccgacgccgcggagctggtgcttctggcaccaatgaaaaaagatctaccgtcagaagtcttcacacaaatctaccagccgccggtatccaaaggcgatggctacgatcgtgacaacctgttaaaagccgacaaacttctcaacgaagcgggctgggtgctgaagggtcagcaacgcgttaatgccacaacgggtcagccactcagctttgaattattgcttcccgcaagcagcaatagtcagtgggtattgccgttccagcacagcctgcaacggctgggtatcaacatggacattcgcaaggtggataactcgcaaatcactaaccgcatgcgcagtcgcgactatgacatgatgccgcgcgtatggcgggcgatgccgtggcccagttccgatttacagatttcctggtcatcggaatatatcaattccacttataatgcccccggcgtgcaaagcccggttatcgactcgctgatcaaccaaattattgccgcgcagggaaataaagaaaaattactgccgttggggcgagcactggatcgcgtattaacgtggaattattacatgctgccaatgtggtacatggcggaagaccgtctcgcctggtgggataaattctcccagccggccgtgcgccccatctatagcctcggtatcgatacctggtggtatgacgtcaataaagcggccaaactgccgtccgccagcaaacagggagagtagatgggcgcttacctgattcgccgtctgttgctggtgatcccaacattatgggcgattatcaccatcaactttttcatcgtgcaaattgcgcctggcggtccggtcgaccaggccatcgccgccattgagtttggtaatgccggagtattacccggcgcaggcggtgaaggtgttcgtgccagccatgcgcaaacgggtgtcggcaatatcagcgacagtaattaccgtggcggacgcggattagatccagaagtgatcgctgagatcactcatcgctacggttttgataagccgatccacgaacgttacttcaaaatgctctgggactacatccgctttgattttggcgatagcctgtttcgcagcgcctcggtgctgacgctgattaaagacagtctgccggtttccatcaccctcggattgtggagcacgctgattatctatctggtgtcgattccgttaggcattcgcaaagctgtttataatgggagccgctttgacgtctggagtagcgcatttatcatcatcggctacgccattccggcctttttgtttgccatcctgctgattgtcttcttcgcgggcggcagctatttcgacctgttccctctacgcggcctggtttccgctaactttgattcgctgccgtggtatcagaaaatcaccgattatctgtggcatatcacgctgccggtgctggcgacagtgattggtggctttgcggcgctgaccatgctgacaaaaaactcattccttgatgaagtgcgcaagcaatacgtggtgaccgcgcgtgcgaaaggggtaagtgaaaaaaatattctctggaaacatgtgttccgcaacgccatgctgctggtgattgccggttttccggcgacgtttatcagcatgttttttaccggctcgctgctgattgaggtgatgttttcactcaatggtctgggcttactgggctacgaagcgaccgtctcgcgcgattatcctgtaatgtttggtaccttgtatattttcaccctgattggcctgctgctgaatattgtcagtgatatcagctatacgctggttgatccgcgtattgattttgagggacgttaatgtcgcgactcagccccgtcaatcaggcccgttgggcgcgttttcgtcataaccgtcgcggctactggtcgttatggattttcctcgtcttgtttggtttgagtttgtgttctgaacttatcgccaacgataaaccgttgctggtgcgttatgacggcagttggtatttcccgttattgaaaaactacagcgaaagcgattttggcggcccgctggcaagtcaggctgattatcaggacccgtggctgaaacaacggctggaaaataacggctgggtactgtgggcaccgattcgctttggtgctaccagtatcaactttgctaccgataagcccttcccttctccaccctcccggcaaaactggctgggaacggatgccaacggcggcgatgtgctggcacgcattctctatggcacgcggatctcggttctgtttggcctgatgctgactctctgttccagcgtgatgggcgtgctggcgggggcgctacaaggctattacggcggtaaagtcgatctctggggacaacgctttattgaagtatggtcggggatgccgacgctgtttttgattattttactttccagcgtcgtacagcctaacttctggtggctgctggcaattactgtcttgtttggctggatgagtctggtcggcgtggtgcgggcggagtttttacgtactcgtaatttcgactacattcgtgcggcacaggcgcttggcgtcagcgaccgcagtatcatcctgcgtcatatgttgcctaatgccatggtcgcgaccctcacctttttaccgtttattttatgtagttcgataaccaccctgacctcgctcgatttcctcggcttcggtctaccgctcggttcaccgtcactcggtgaactgctgttacaagggaaaaataaccttcaggccccgtggcttgggatcaccgccttcttgtcggtggcgatattattgtctttgctgatctttattggtgaagccgtccgcgacgcatttgatcctaataaggcggtgtagcatgacgcaaactctgttagcgattgaaaatttgtcggtgggttttcgccatcagcaaaccgtacgtacagtagtcaatgatgtttcactacagattgaggctggcgaaacgctggcgctggtgggtgagtcaggttcaggcaaaagcgttaccgcgctgtcaattttacgcctgctcccttccccgccggttgaatatctctccggcgatattcgttttcatggcgaatcgctgcttcacgccagcgatcaaacgttgcgcggtgtacgcggtaataagatcgccatgatttttcaggaaccgatggtgtcgttaaatccattgcataccctggaaaaacagctttatgaagtgctttcactccaccgcgggatgcgtcgggaagcggctcgtggcgaaattcttaactgccttgatcgcgttggtatccgccaggcggcaaaacggctgacagattatccgcatcagctctccggcggcgaacggcagcgggtgatgattgcgatggcgctgttaacgcgaccggaattattaattgccgatgaaccgaccaccgcactggacgtctctgtccaggcgcagattttacagctgttgcgcgaactgcaaggcgagctgaatatgggcatgctgtttattactcataacctcagcattgtcagaaaactggcccaccgcgtggcggtaatgcaaaacggtcgctgtgtcgagcaaaattacgccgctacgctatttgcatcacccactcatccttacacacaaaagctactcaacagtgaaccgtcaggcgatccagtgccgttgccagaacctgcctcaacgttgctggatgttgaacagcttcaggttgccttccccattcgcaaagggattttgaagcgcattgtggatcataatgtggtggtgaaaaacatcagttttacgctacgagcgggtgaaacactgggtttagtgggcgagtccggttccgggaaaagtacgacgggactggcgctgctgcgactgattaattctcagggcagcatcatctttgacggtcagccactgcaaaatttaaatcgccgccagctgttacctattcgtcatcgcattcaggtggtatttcaggatccaaactcctcgctcaacccacgactcaacgttttgcagattattgaggaaggcttacgggttcaccagccgacgctttctgccgcacaacgcgaacaacaagtgatagccgtgatgcatgaagtgggattagatcctgaaacacgccaccgttatccggcggagttctctggtggtcagcgacaacgtattgcgattgccagggcattaattcttaagccctcgctgatcatacttgatgaaccgacatcatcactcgacaaaacggtacaggcgcaaatattgacgctattgaaatcattgcaacaaaagcatcaactggcctatttgtttatcagccacgatttgcacgttgtccgcgcgttatgtcatcaggttatcatactgcgacaaggggaagtagtggaacaaggaccgtgcgcgcgcgtgtttgccacaccgcagcaggagtatacgcgtcagctactggcgttgagctgacgcttaaaaaggattgtagtttgaaaagggttcggcaattgccacaccaaaatttttcaatcggcatgttgcagcaaactcgtcctggcgatttacaaacaggcacggctcaccttcacactccagcaccgaacatggaacttcgatgtcgcttaacgcctggcttagtttatacatcaccgaccatgcattatcaccatccgggctaagcaatttaagcgccaccaggctgttgtcaccgcacggtccattttgcggaatcggttcaaccttcgaacctgcgaaaccagcagaccagcgatagttctgcggcagtcgatggacgattgagagttgtaatgaagtcacttattttccccggaagcacattcacttcacaatttgtttacatcaattttaacacatcatcaacaatccgtctttatacagatcgtaaagattgatgcctcgcctgcgtggcctctatggctctgatttaagtaatatctgcgggcgtggtcacgtttgcggggctatatgtacccgtttctgcgatctaactcaacctttttaactacaatgatgtgactttttacataaattgattttacataaaataaacatatatcgggggaatgatagatttgtggttgacatgcatcaacaaaggaagccttttagcttcctcgttgtgcaatagatcaccgttttttcggccgactggcgtacagacagaagagaatggagctggttgcgcagaatgcaattgaccaaatcatcggccatgcagagttaaaggtcgcaagagaaagcaatgcgccaacaattgcccctatgccaaaacggaaggttcctgccagcgaagatgccgttcccgccatatggggaaactcatcaagaatgaccgccatcgcattggatgacaccatcgacacgcagcccacaaacgccgcaacgccaaccaccagcgaccaaaatcccagccccagcagcgcactgatgaccatccacgctgccataataaattgtatccacaaccccgagcggaacatatttaacgcgccaatgcggcggacgaagcggctgttaaagatggtcatcacgaacagaaaaacaatgtttagcgcaaagtaataaccaaagttttccggcgcgacgtggttaatttcaatataaacaaacggtccggcgcttaagaatgagaacatcccggcaaagctgaaaccactggcaagcatgtagctcaggacacgtttatggcggaacagcgccgcaaagttaccaatagtggtacgaatgtgaaatggctgacgacgctccggtggtaaggtttctttaatcaggaagaaaatcattgccgaagccagaatcgccgctaatgccaggatccagaagatgtaatgccagctcagccacaccagcacccagccgccaactatcggtgccatcagcggtgcaatggttgtcaccagcatgacaaacgacatcatccgcgagaactcttctttcgggtaaatatcgcgcatcagggcgttaatgaccacgctggccgcagccgcagccagcccgtggaagaaacgcatcacaatcagctgatcgatggtgtttgccaacgcacacgccaccgcggcggcggcaaacaccagcgtaccgccgagcaccaccggcttacgcccgaagctgtctgccatcggcccgtagattaactgccccaacgcaaagcccagaatataagtactgagggtcatctgcgtactgcccgccggtacgccaaactgcgctgaaattaccggtagcgcgggcagatacatatcaatcgacagcggcatcaacatggccagcaggccaaggataaaaacaatagcaaacgacgaatgctgtcgggtggtcacaacgggctcctgaaagtcattgaaaagttagacgacgctggcaatttcttcttcagttaacggacgatattcaccgggggctaaatcagcatccagcgtaataccgccaatacgttcacgatgcagctcaaccacgtggttacccacggcggcgaacatgcgtttcacctgatgataacgcccttcgctgatggtcagacgaacctgcgttggggtaatcacttccagcaccgcaggcttagtgagatctttttcgttatgcagctgcacgcctttagcaaattgctctgccgtatcgtcagctacaggtgattccagtgtcaccagataggtcttctcgcaatgatggcgcggagaagtaatgcggtgcgaccactgaccatcatcagtcatcagcaccagaccggtggtatcaatatccaaccgccccgccgcatgcagtttccacgctaccggttcatcaagaaaatagagcaccgttgggtgatcagggtcgtccgtggagcaaacatagccctgaggcttattgagcatgaagtaacgtggaccgtgttgctgcgccagcgggttgccatcgtaagcgacatcatgttcaggaagcagtttgaacgctgcattacggacgatttcgccatcgacggtgacacgattgccgcggatttcacgcccggcaatagcacggctaacgccgagttgctgtgcgataaatttatcaagtcgcatgtgtgtgattttgcctgtaaaaacggaggtcgggcattgacccgaaaatctgaactgttgtctgcccagtatagcggtctaataacatccctcaagggaaaaagatccatggcatactattagcagaataatctacctacgcgagaccatgatttttacacttcgcccatatcagcaagaagccgtggatgccacgctcaaccattttcgtcgtcataaaacccctgccgttatcgtgctgcccaccggcgcaggtaaaagcctggtgatagcggaactggcacggctggctcgtggtcgcgtgctggtgctggcacacgttaaagaactggtggcgcaaaaccatgcaaagtatcaggcgctggggctggaagccgatatttttgccgccgggctaaagcgcaaagagagccacggtaaagtggtatttggcagcgtgcagtctgtcgcccgtaatcttgatgcctttcagggtgaattttcgctgttgattgtcgatgaatgtcaccgtattggtgacgatgaagagagccagtatcagcaaatcctcactcacctgacaaaagtgaatccccacttacgcctgctggggctgactgccacgccttttcgattgggcaaaggctggatctaccagtttcattatcacggcatggtacgcggcgatgagaaagcccttttccgtgactgcatttatgagctgccgctgcgttatatgattaaacacggctatctgacgccgccagaacgactggatatgccagtagtgcaatacgatttcagccgcttgcaggcacagagtaacgggctgttcagcgaagccgatctcaaccgtgagctgaaaaaacaacaacgtattaccccgcacatcatcagccagattatggagtttgctgcaatgcgcaaaggggtgatgatttttgccgcgacggttgaacacgcaaaagagattgtgggattactgcctgccgaagatgcagcactgattactggcgacacccccggcgctgagcgcgatgtgttaattgaaaattttaaagcccagcgttttcgctatctggtcaacgtcgcggtactgaccaccggatttgacgccccgcacgtcgatcttatcgccattctgcgccctaccgaatcagtgagtctttaccaacaaattgtcgggcgcggtctgcgtctcgctccgggcaagactgattgcttaattcttgattatgcgggtaatcctcacgatctctacgcgccggaagttggtacaccaaaaggcaaaagtgacaacgttccggtacaggttttctgccctgcctgcggttttgccaacaccttttgggggaaaacgaccgccgacgggacattgattgaacactttggtcgtcgctgtcagggatggtttgaagatgacgacggtcatcgcgaacaatgtgacttccgtttccgttttaaaaattgcccgcaatgtaacgcggaaaacgatattgccgcccgccgctgccgcgaatgtgacaccgtactggttgatccggacgatatgttaaaagcggcgctacgactgaaagacgcgctggtattacgctgtagcggcatgtctttgcaacatgggcacgacgagaaaggcgaatggttgaaaatcacctattacgatgaagacggcgcggatgtgagtgagcgtttccgtctgcaaacacctgcccagcgtaccgccttcgagcagctttttatccgcccgcatacgcgcacaccgggcatcccgctgcgctggatcaccgccgccgatatcctcgcccagcaagccttattgcgacacccggattttgtcgtcgcccgcatgaaaggccagtactggcaggtgcgtgaaaaagtgttcgattacgaaggtcgttttcgtctggcgcacgaattacgcggttaatggtagttttgattgatgtataaggcgattgagtatagaatctcgcccgcttttgcatacgcaaagcagatcacttacctgttgctgggtcgcctgtagcaggattaatttaagagagaaagaaatgtttactatcaacgcagaagtacgtaaagagcagggtaagggtgcgagccgccgcctgcgtgccgctaacaagttcccggcaatcatctacggtggcaaagaagcgccgctggctatcgagctggatcacgacaaagtcatgaacatgcaagctaaagctgaattctacagcgaagttctgaccatcgttgttgacggtaaagaaatcaaagttaaagctcaggacgtacagcgtcacccgtacaaaccgaagctgcagcacatcgacttcgttcgcgcttaattgctgaataagttgtaaaaaaccccgctccggcggggttttttgtatctgcagattatgcctgattacggtattgctattttttgcaggccagataaggcgttcacgccgcatctggcattcagaacacaaaaccgattaattgccgccagacgtccggcgctgcaattggtcgcgcaaattcggcggcgtgcctttaatggtcaaggtatcggttgctggatcccagaagatgcgttcacctaacagcatcgcatcaaagttaatagtcaagccaccgccgctaccggcaaacttcgtcaactgacgcagtgtgctacggtctgccgggaagctctcttccagttcgtagcctttttcagccgcaaactccgtgaagctcacttcgcttacgcctgccagctctttcgacagcgatttcagttcgatctcttcgcctgcctgcagctgctcattacagtagctataaacctgctggcgcacgttctgtcgctctgctttatccagttgtgcttcggcagtgaaatcatcaaccgcttgcaacagcccacggttttgcgctttcgcgtttaacccttcgctggccccgaggaaatccataaagaaatccgccactttgcgccctactcgccctttcaggaaagtgagatagcgggtggactctggattggtttcccattcggttaaatcgatacgcgcaacaatatccgcatgattgatatcaagataatgggttgggttgatgtcgagattttcgttaacgcgcatactgctcaggttgctcagaactgccaccagcaaatactccaccgccagatagcgatagtggcaaaacagcacgaatccaccgtcagcaaaaggatatttcgctaattcgtcacgcaggcggccggttgccgcgcggctaaatgccaggaagtcctcttcgccctgacgctgtaagcgcagcgtctgcgccagttcactctcttcgctaaacaagccgtaagctttatttttggcgctatagacccgatgcagttctgccaccatctcaacgacggtttctgtcggttccagcaatgaatcgcgcaacaccagctcaaggttctgctcatcacgcttgataagctggtgcagagcaatctggttgatatccagactcatgataaactctcctttaagaccgggcggtattcaaccaccgccggttaagcgacgcaataaaagatggcggtcattttacagaaggcagcgtaacgagaatgatttaacgcataaaaaagcagaaaaaaaaccgttgctacggtaatatgttgccctttcatcaactaactgatttcgatttatgccacaaatttcccgctacagtgatgaacaggttgaacaattgctcgcagagctgctcaacgtactggaaaaacataaggctccgaccgacctttccctgatggtgttaggcaacatggtcactaaccttatcaacaccagcattgccccggcccaacgccaggcaattgccaactcttttgcccgcgccttacagtcctctatcaacgaagacaaagcgcactaagggaaacagataacaggttatggtaactcatcgtcagcgctaccgtgaaaaagtctcccagatggtcagttgggggcactggtttgcactgttcaatattctgctttcgctcgtcattggcagccgttacctgtttatcgccgactggccgacaacgcttgctggtcgcatttattcctacgtaagcattatcggccatttcagcttcctggtgttcgccacctacttgctgatcctcttcccgctgacctttatcgtcggctcccagaggctgatgaggtttttgtccgtcattctggcaacggcgggaatgacgctattactgatcgatagcgaagtctttactcgtttccatctccatcttaatcccatcgtctggcaactggttatcaacccagacgaaaatgagatggcgcgcgactggcagctgatgttcatcagcgtgccggttattttattgcttgaactggtgtttgcgacgtggagctggcaaaagctgcgcagcctgacgcgtcgtcgacgcttcgcgcgcccgctggccgcattcttatttatcgcctttatcgcctcgcatgtggtgtatatctgggccgatgccaacttctatcgcccgatcaccatgcagcgcgctaacctgccgctttcgtacccgatgacggcgcgacgttttcttgagaagcatggtctgcttgatgcgcaggagtatcaacgccgtcttattgagcaaggtaatccagacgccgtttccgttcagtatccgttaagcgaactgcgctatcgcgatatgggcaccgggcagaatgtgctgttgattactgtcgatggcctgaactactcacgcttcgagaagcagatgcctgcgctggcaggttttgctgagcaaaatatttcgttcacgcgccatatgagctccggcaacactacagacaacggcatctttggcctgttctatggcatctcgccgagctatatggacggcattctgtcgacccgtacgcctgcggcattaattactgcgcttaatcagcaaggctatcagctggggttattctcatcagatggctttaccagcccgctgtatcgccaggcattgttgtcagatttctcgatgccgagcgtacgcacccaatccgacgagcagaccgccacgcagtggatcaactggctgggacgctacgcacaagaagataaccgctggttctcgtgggtttctttcaatggtactaacattgacgacagcaatcagcaggcatttgcacggaaatatagccgggcggcaggcaatgtcgatgaccagatcaaccgcgtgctcaatgcactgcgtgattctggcaaactggacaatacggtggtgattatcactgccggtcggggtattccactgagcgaagaggaagaaacctttgactggtcccacggtcatctgcaggtgccattagtgattcactggccaggcacgccggcgcagcgtattaatgctctgactgatcataccgatctgatgacgacgctgatgcaacgcctgctacatgtcagcacacctgccagcgaatattcgcaaggtcaggatttgttcaaccctcaacgccgtcattactgggttaccgcagcggataacgatacgctggcaattaccaccccgaaaaagacgctggtactgaacaataacggtaaataccgcacttacaacttacgtggtgaaagagtgaaagatgaaaaaccacagttaagtttgttattgcaagtgctgacagacgagaagcgttttatcgctaactgattaattataaatcagttagcgaaatatcttacttgcaatcggtgtggaaaacggtagtattagcagccacgagtcggcacgtagcgcagcctggtagcgcaccgtcatggggtgtcgggggtcggaggttcaaatcctctcgtgccgaccaaatcgaatatcggatagcattggtaacctattgaaagcccgttaatttgctgattagcgggcttttttgttgttttcagtcaccggattgaataggtaagatagggttataaccggattttttagctacacgtttagctatacggtccagcgtgtagctaaagccgtatagctacgaccaggcatatagctaccgatgagtaaaaaaacatggcacgaaaaaccaccccactaaccattacggagatcaaaaacgcacgaccaggggaaaaggaatacaccctgcaggatggtggaggattatttcttctggtgaaaccctccggatcaaaaatctggcgttttacgtactatcgcccggcagataaaaaacggactatcatcagcctcggatcgctgaatgatgtttccctgtccgatgccagagaacgacggaatgaatacaggtcactcatagcgaagggagttgacccacaggaccacgaacgccggaaacgtgaagcagagagtcggaaaaagggcaacacgttcgaaaaagttgcctcggactggtacgagatgaaaaaaggccagaatctggcttacaacacgattaaggatatctggcgatccctggaaaaatacgtattcccgtacatcggaaacacgccaatagataccctcacagctcgccgctttgttgagatactcacacccattaaagcacgcggcaacctggaaaccctgaaacgcgttttacaacgcatcaatgaagtgatggattttgctgccaacagtgggctgattgacatcaacaccgccgcgaacgtccgcaaggcattcccctcacccaccaaaaagcacatgccaaccatccgaccggaacagctaccgcagctaatgcacgatttatcggtcgccagcatagaacggcaaaccagattgctgattgagtggcaactgctgaccgtagcacgcccagccgaagcagccgccgcacgctgggaagaaatagatctcgatgccgaaacctggacgattccagccggacgcatgaagatgcgccgtgaccatgtgatccctctttgcggtcaggcgatggctgtactggaaacaatgaagccaatcagcgcacacagggaacatgtttttcccagccttaaaaatccaatgctgccaatgagcagccagaccgctaacgctgcattgcgccggatgggatacgctggtgtgctggtgtctcacggattacgcgccatattcagtacagcagcgaacgaggaaggattcgagccggacgtaatcgaggccgcactcgcacacgtggacacgaacgaggtaaggcgagcatataaccgaagtaactacctggaaaagcgcgtggtgcttatgcgctggtggggggaatttgtagaggccgcagctaccggagtgaccatagccagtggtaaaaggggtatccgtgccgtgtaactgtacaaaaagccagtgcaaccagtgaaaaccatgccaaaccatcgtataattgccacaaatttaacgacaaggccggagtatatgaaaattctattatgcaaaataccaccgcctacggcgaaggcctgcaactggccttaatggcaaatcgtgaattctggtcaacgtacgatccggaagacaaatcaacagcccccacaaaacacgaggtagtcagttttttgcgctcgcgtggcgcatcgaaaaatctggctgaaagcatcgacaaggtgctgagacccaccagccttaaatgcggtggacgacctaagaagtggaagcggtaatcacaatagcggccctttgcggtcgctatttttttgcaaaaagaaaagcgtaatcaatgagataaaaaacagtgggtaccgttttaaaacggtgggtactgtttttcccgccctgccctgttttaccgtatttatcaccggaatacgccggattaacgaggtaaaacatagtggaaacaatcagaaaaatccttacccgtcaggaagtaaaaaatattctgcgcatcaaggcagacagttcgctacaggacatgatcaacgccggaaaattcccgaaaggcttcaaaatcggtctgcgtcgtgttggctggtatgaagatgaggtgctggcctggctgaaagaacgcgaggaagaagcgcgcggaacggctgcgtaatggtgtgaggcgtaacgcgatgaacataacaaaaagcgccccgttgccggagcgcctttgtgaacgaatagcctactgcgccatattgcttactgtctacgaggcagattatagcgttgtggtcgcacagagtgaaggcgctgatcaccgttactacagcacgccagaaatgcagaatattttgctgcaaaatgccgttggtcacgccgtccggaaagcaaaaaattttgctggtggcgcgactgatgcgattttgtcaggtcgccaggtgctgatcaatctgatgtctgatttcgttctggataaaacaaaggcgaccgcagagagccgccagtggaaaagctacatacttgaacgcatcaccaacaatgccacatttgcggctggtgggcaaagcgtaaccggaaaaaaattccggtggggctattcctgctctttggccttgcgacgctggcggtattcaacttctcgctttaatgctgctgttacaaactgccctgtactttcaccaggcatttttaccgcctcaacattgttcataacttcatgcggaacccttgccgcaactgtttgtgattttgcgtttactgcttttgttgccatgttgtgtaccccttacaaaaaacaaatgcagtatgcaggaaaaaaaataagtgttcaacacttgacgtgtttaacaccagggcttaaattggtgttcaacaccttactgatgcaaggtgcagaaacgacgaaacccggcagtgcgctaacactaaccgggcttctaaccaccaacgatagaaagcgtatcgaggtagctatgagaaattataccagacacccgcaagggcgggactcgtacaacctgaataaatacatctggcgttttatcgccctgagcacggcacaaccgcgcgtgattcacatcgtggccaccagcgaacaggaagcacgccagcaatccccggctggctgcgtgatggtattcgctgcccgtattcgccaggaggtacgccatgattaacctgtcaatttctgaccttaacagcattcagtttgatgagaaattcaccgggcagctactggttaacgtggagaatggacgcgtggcaagtaattatcacctgccggatggtgcaattgccggaagcgttgaagcattgctggagctggcagaacgtgcgcgactgattaagccgttaacgagccatcacgatgatgatctgcattttaccggacgcatggtgagtcactacgaaaacggcgttgaagtatcccgagaacggctgcgagatgattgctgtttcggaacactgccggaatttatcgaattgctgaccagttgcggttatcaggttattcagggggtgaatcatggataatcagcaagcaacaatgacaattaccctgagtgtgccagatgatttcaccggacgcatactggtttacctggataaagggaaagtgaaatcacaatgccgactgaaaagtaatgagattgttggttctcctgaatttttttctgaactctgtattcgtgcggaaataaaaccggaactgctgacaggaaaataaaaccatgaaaaagaaaaattctggctttactgccagtggtctccctcggcctgaaatccgccccggcgatattttccgggataactacggcggcacggtaacgattaaaagtattgccggacggtgcgttacttaccgccgtgatgggtacagctacgactgcgtgatgcctgtttatcagttccggcgtgatttttcactgatacaggccacaccacgcaaacagcccaccagcaacgcaaaggcacgggcaaatattcagaaaatgaaaaacatgattaacgcattcaggggcacaaaatgaaactggcaccgaacttaaaaaaacagccacacgacaaaatgaccgaagtcattatttttgcgggtagtgatgcctgggcgcacgcgaaacagtggcaggagcaggacgggcgacttgctggcgacaacgtgccgcctgtatggctgggagacagccagcttgacgaactggcagacctgaaaattatcgacgatggtcgctattgtgtccggctgtacaaggcaggccacatcaagccgtcaaatattaacgccatcgggcaaaagctggcggcggcaggtgtacgggatgcgaattattaccccgagggaatgcacagccagaaacgcgaggagtggcgcgaatatctggaacgagagcgccagaaaagactgtccggagagataccagaggaagaaaaaaacgaccagcgaaaaaccacactgccaatgagtattggatctgcagggtacgacacacagcttgattatgtcgttaagggcgtgattccggctaattcattgtgcagcacatacggcgcgagcggttcctataaatcgttcctcgcgtgttcctgggcgtgtcatgttgccacgggtcgccactggggaggccgcagggtggcgcatggttcggtgatgtatgtcgtcggtgaaggtggcattggtgtccctcgtcgtatcaaagcatgggaaatcgttaatgatgaacgggtgaaaaatctgtacctggtaaaccgcccgatttttccggcggtcccgcttgatgttgatgaaatggtcatcgcttcccgtcaggttgaacgggaaacgggtaaaccggtacgcatgattattctggatacgctggcgcgttgctttggcggtaatgatgaaaatgacgcgcgggatatgggggcgtttatccgtggatgtgacgaactgaaacgacgcacaggggctacggtactggtggttcaccattccggcaaggatgaaacaaaaggggcgcgtggttccagtgcatttcgtgcatctctggacgctgaataccgtattcgccgtgaaggtgcggacagtgaagccctggttatctcctgcaccaaaatgaaggacgcggaggaactgaaagaggctgcatatgatttacgcgtggtggagctttttaccgacactgacggggagttaatcacgtcgctggtggttgtggataggccgcgcccacctgttgaactggaacgcatcgaggaggccgggaacaagacggaaaatcacgctgcgctatggcagtgcatcagaacgcgaacagcacacggggaggcgtgcactatcgcccttctccgcgatgatatgaaaaagctggggtatgaaatgaaaaacttccggcgctggctgtacaagctggaaagcgacggcgtaatcgctattgacggtgattatgtgcgcccactgtaaaaagtgaggagcaaaagtgaggatggcgggtaatttaacaaaaaatcaacgccactcctcactttctcacctgtatataggtcaaaaagtgaggaatgaaaaacatattgtaaaacaagacattacaacaacaagaaaaacaggtgaggagcaggacgggaataacaaaaagtgaggaacaaaagtgaggaatggtgagttaatagaaatgaggtaataaaaataacaggtaggttaaaaaacacaccatgcaagatattaactaaaacttaactatttacctcacttttgcgtatatataaggattaaaaagtgagtacttaaaaatacatttaaaatcatattgttattaacttcataaattttcactgtgcagcaggtgaggaattaaaaaatcaggaatgttaaaaatgaaaacagaatgttgtgtcagtgccgttgggcaacgtagcaatcagtaaaaacgatggggcaaagcatgactaagctgaccattaacagaaaacctaaaggcatttacggcacgccgcagaaaacgacgcaggcggcgcaggagcaggataaaaccacgtcggcgcataaagtgatgcccggtaaccagaaagcgcagcagaagcccacaggggcgacaccgtggcggcatatgaccaaacgccagcgcaaaaaccgcaggcgcgttaaccgccttatcgaactgtggccagaattattcagccgggaagcaccgaagccgcttaaggtggggatatttgacgacctgatgcaggatctcgccgtcagggggctggcattcgggccaggggcattacgtgcgacgctggcatcttatgcgcagtgtccgcgctattaccgcgccttaatggctggtggggtacgctacgacctgaaaggccagccgtgcggcgaggtgacaccacaggaacaacaggacgcagaaacgcggctggtggcgctgaatgagaagcgcaaacgtcagcgccgggcagcaaaggagaaaacaggcgcatgattcacgacagcaaagcggaagcactggaagcgcgtggtctgtaccggagagcggcggcgcggtgggctgaggtcatcatgctggcgaatgatgacaaggcacgggaacaggcggcaaaacgtcgcgcggaatgtatccgcaaggcagcacgcccaccagcacggcaggataatttcggggagatgcgcgaaaccatcagccgggcacatgccgggatgggattacatcagcccaatggtaaggcattcaggaaataccctggatcgaaaaattgcagtcagtgacggaggccgggatttttcccggcttttttgtgccagtaaaaagcccgcagccagaagtgttgcgggctttgtttttcaggtgattgaagtcaatgggaagaacgcgatcatcatgcgttattgtttcataaattgcaatgatgtagatcgtcatttcagtttgtgcaatcataatcgttgttttgttcaggagatatgactatgagaaaagccagcgtgaaacccgttttactcgctcgtgagcagattgaagcattacagcgcatccaggacgaggaacgccgcaattctccgctggggattgctccgagcattcatgaggtcgcccggcgtttaatgcagcgggcgctttatcccgtagaacgtccggcctgatggtcgtgattttttggtgaaaaaagagaggtggtaacaatgccagcaagcaaagaagatttgcgattaaaactgatggaggtggttaacgctctgtcagagtcgcagggcagcactccgcaggagattatcgaaattctgaatgcgatccccgcacaggatttcacaaaagcagatgaggacaacgcgaatcaaaacatcgtcgcgtcagtcgaagatgaatcctcactggcagaagcccaggctaaagcagattccgcatacagcaatatgggccgtcgcgctccagccccgtttgctggtgaaaagtcgatggattaccgcaagcgtgcattaattggtgcacagaagctggctaaaaaattcagtgatgtggatattcgttccgtttcagattctgcaacgctggcggtgctggaagatcagatttaccaggctgcaaaagacagtgttcagtgggccgtggaaaacacgccgggccatttgggtaaaaccgtaagaatggatgaagctggtcgtcgtattactgaatatcagggcgatccgaacgtctggctgaacgccttcaaaatccctccccgtcgcctggtcaaaattaacactgcaagcctcgcgggggcatgaaaaacgtgctgagttcagccctgccggatttggcggggcttattgcttataaccggataacattatgcttttaacagaaattgaggcggcaaagcagattcgggacggtcagctaccgtcgccttatcagttttccaacatgtggctggttaacctgcgtattacaggaaccggtatggcctaccgcgccgaagaaaaagaatttgtctggcgttcaccgcaaacttatctcaatccgcagttcctggaacgttgcgccggagtacccgtcattatcgaccatcccgaaggcaaaaccattgaagacgttggcgaacggtcgcgcattattggcaccgtcatgttgccgtatattcgcggtgacgaggtgtggggtgtatgccggatttacgggcaggaaatcatcgattacatccagaaagcacggggggaggtatccaccagcccgtcggttgtgttttgtggtgcgtccggtggggcagaagttcctgatgtaatgggcgaggacaattttttcattgagggtacgccattccttatcgatcacgttgcgctcgtgccgcttggtgtttgggataagggcgggaaaccatcgggtgtggaggtaacaacgccgacagcagaagaacagctcgccggaatggtccgggacgttattgatgcggcctgcaagccagccctggaaaaactggaagaaatatccgggcggctggctcaactggaaaaaacagagtgagtgaatcatgaaaattgctaaaaacttaaatctgattatccctgtgcgcactgaaaagggaaatggctggatccatgccacgccgatcagcaaagaggtgtttaaagagcatttcttcatcctgagtaaaaccttttctgccattttttctgaaggtcttggtgttgttgcgggtccgcgcgttgcctgccttatgctggagaaaatctcccgtgactccggtttatgggatggggagaaaggcatacgtaatacgctcataaacgaaattattcgcctggcaaaccttgtttatccagtggagggcaaaggctacgacacaatccctctcgatatggcgctggagcgtgaaatcgttgatttggacgaagtggcgggtgaacttgttttttttacatgcgtctcgtcgataaattccccggagcagacgaaggggactatggatgcggtgaatggaatatggagcactcaatgctcgtccttgagtcttacggaatggatcgcttcattgccgacattgaagcctgccgtcagttctggcgcgacggcgaacacgtcatcagcgacatcctcgactactcagccggagccggattcagagacatctgtgcagattccggtctgaatgtaaaaacagcagctcagtttcgtgagctgctcaaattcaaaaatcccgcaggagtattgtaatgtcaggtaatcagatgccagttctaacgctggacgttaatgaagaacacctcaaacggcttgaggcaatttttgaaaagtatcgcaacgggctgatgatcggccctgccggaacgccgatgaaaataccggggcaaagtgggcgcagcgtgggggcaggcttacccgtggcggcaaaatctggtcggacaggaccggatgtatccgggagagtgagggacgaaaaagggcgctttgtcggcagcggaaaaacagcagattcgttcgtaagcaactataaaggtcgcggcgaaacgatgtttgataagtatctcagcgggctggggaaaaatgcccaacagacgctgaaaacttacaagcagatcaattctacactacagacgaccacttcaagattaaacaacctgtttaaaacaaccgtatcgtggggaacaaaactctcggttatgggcgttgccggaccgtttggctttggcatgatgtcccgtagtgttgtagagaaacagaaaaatgcagatgagctggtggcaacgccaggagagttaaaggcggcagaaagcacttattcgccttatttttccggtgttggcaatgtgctcaatacactggcagcagcacaaaatgatatatcgcatcctgcccgcgtcggcctgcttaatctggggctaaatcctgataaaaacgcgactgaaaacctgcctgtattcctgaaaaaggttgcagcgctggcaaaggaatatcagggaactggtcttacccagagcaatttcagaggaatggggcttggatgggtaaattttggtcttactaaccagttagtcaaatatcaggacaaaatacctgaactcaacaaagagttttcgttacgtgcagcgcagaatgattcgttactgacctctgcacatacaagtaaatatcagaatcttaccagtaacctggaaaaaaactgggatcggcttaccagcggatttcagggagcaatggcggggaatgaagacgctttaatcagaatgtctgatggtaccacgaatgctgccctgaatttcatgaatggtgagaactttaaaaggattctgactgatgttgaaacggggctggataaacttggtaagtacgttaatggcccggattttaataacgacctgaacaattttgccgaaaacgttgcaaaggtcaccaaggcacttagcggatttgttggttttgccgttgaacatccctggctttttggggccgcagtgcttgcggggccatcaagagttggtgccgtggcagccacaacaaccggagttgccgctcgtgttgtcggtggaagtcttcttggggctacagccggaacagtagcaggattggctattcctacaaataacacacctaccaccagtgaggaaatgaaagggctggaggggcgtttcaactttgattattttaacgaagtgcaggagtggcaaaaaaacaatccgggtaaggtctggcctggaggattgcagggattttcaaatcaagtaaacagatctgcatatttatccagagggatcaggaataacaatcccggaaatcttaatttcgcaggacaaaaaggggctactctggaatcggggccaaatgcccgttttgccagcttcccgacgatgctggaaggcattgccgccttagatcggcaggtaatgctatacctgaaacgcggcaaaaatacgattgatcagattattgatatttatgccccttcatctgatggaaataacacatcgtcctataaaagctatctttctcagtacaccggattaggtgttaaggagaaaattgatggttctaattttgaggtcatgaaaaagctaattcagggcattattaaccatgaaaatggtgctgccgctaaagctgtaagtgttgaagatgtgatccgggcgctggctatgaatcgtgggattgtccctgcagcaggaaacaatgatcagaacgttaagttggaaattgttcggaacgctggtgccgattacttcgcgcaactaattggtgctcaacggttcctgggatgatttaaatacacgcgctttccggcgcattaatacagtctgaggggaagtgtcatgtttatgagcaaggcagaatatgccaaacacaaaggcgtaagccgccagacagtttacgactggatcgagaaaggcgaagtggtcatgtccggtaaaaaaatcgatgtggaagcgacagagcagcggaacagcccaccagcacagggaaaagataccgtttctgaaatgtggccagagagaacgctggaaatgacgtggggcgagttctggaaagcagttaaggccagagacggtaaaatccctgcaccagtaacggacgatgacatacagcagcgtgtgcaggatgcagccggggaattatgctgtgaagtgcaatttcttgatgatggtgctatctgccttgaggattatgctgggcaatattactttgagcagtatgattttcgggaaaatgccaggctggcaattcgtatgctgcgttgtgagctctgctatgttgcaggtgattgtcccgatgagctggataactggagtgaagccggactaaacgccctggctgagtgggaaaaatcatcccattaatgaccgtaaaattcgcgaaaagtgtcaagtcaggccgtctgccgggttgacactttacactctgaacgcgaaaaagtgtcaacctcgctgtaaaccccgccgttactggctttgcgccagatttaccacgtcaaaaagccgaaaaaatcgcgaaaagtgtcaagttgccatgcttagaaatgctaaggtttgataaggtttttcgcgaaaaagtgtcaagtgtgtcaacctgcgatgttaaggtttgttaaggtcttaagccggaaagtgtcaaccagccccctaagatttcctaaggtgtaaatcatgaccatcaccgaagccgatatgctggagatgatccgcagcattgccggaatcagacaaccagcaagcaaaattaacaggtgttcagcgcctgtttccgttgtgctgcaacaggagcgccaccagcatgatgatgtgaggccgtatcagtggcggaaaccggacaggccgcgacggtgagcggagcgttcggtaaggctacagccaagccttacattaagcctacgggtaacccttcgaaggggctttaaaggggagatgattatccttacccgttgataaacaagcaaacctcaaatttgaggtttgtatctgcctgacttatttttgtgctaagttgttgatatatccgacgacgcaaaattgcgctggctacatccctcacatctgaggactgttaaccagcaggccggaatatattcacaaactacgaaattttcgcagtttaattactcgccagcttaatcgctaacccactgatattttcggaaacctcgatttgaggagaccggaacgtctacatgactgcatcaccataacgatttccgttacagttgatgtgcttttttgctggtaaggcctaacccgttgattcttccacaattccccattgggggaggctgggcggcctgctgtggacttttccaccattggtgggaaacatggcaccacatccaccagcttaaacgcgcttcaccttcccgttatcagtcgccacaattacggcattgtttccccatcctctggaggccatgacaatgaccgaagccgaaatgctcaaaatgattcgccagattgccgggatcagaccaccagcaggcaaacaggaggccacgcagccggacagcgtgatagccgaaaattacgcgcgtgtggtggctgaggtgatgcgccgtgacggtatcgagcttaacggcgttgatatgcgcgacatacgaatcagagttctggagatgttgtcatatcgtcgccgcgtggagatgtaccgggagagcgagaaaaagacttaccagtggaaaaaaccggagcggctgcgtacgtaatacgtacggacatagagataaagacgaacagtattctggttcagtgcaaaaccacgtaaacgtggttttgcgtcctgagtcatcgtaatggttttatgcgtcctgcgttgcgctggtgggcgtgatgccgatatggggattcccataacgggttatgtgtgatcatccaccagcttgataacggataacagggagtcataacggttaaaattgtatacttttgcagcaaacatttttagctacacgttaagctatacgatttttgacttaaaattttcgacttcaattaaatcaagaggttattggcgtgttttgaatactctcgtgccaaaaatcccaagaaaaaaccaacccttacggttggtttttttatatctgcaattaattcgataaacagaccgtgacacatcacagcctgtttattttctgttatcagaacgtccagaccacacccgcctgagtattccacggcgattctacccctgcgccattgccatagctgactgacaaatgaccgcttaacgtcggggtaaacgatgaccttataccagcctgataaacgccactggttccagccacatcattattaaatttgccatcgtcattaactttcacctggttagaatcggcgtattcctgacgcacggccgctttcagccagggttccagcgtcgtaccgttttgcaggtccatgtgatagcttaccgccgttcccgcttcagcgcgtaatatccgggtatttcccacatccgcgcgcatgccgtttgataacgtgtagtcctgaccatctgtggtaaagccggtaaaggccagatagggtctaacactccacaatccgtcaacccaacggaacccgctctcaacatgagcacccgcgccgttactattgtaatcgccaaacgctgttgccccattactcatcttgccatggatggtgttggcaaaacggtcaactttcaccaccccatcaacataggcaccgttctgatgctcccaaccggcataagcccccagggtatagctatcgatattacctttgccgccgcgatcaaaaccaatatcagaatgagagtaaccaaagatcaagccgcgaattgtactgctttcttcacgggagaaacggctatcgataccgagcgtcaggcccgtcaatgtttgctcaaaaccagctcccgcatcagtggtcacgttgttgcgggtgttaattgccgaactccacatcgccgtatcgtaactaacgccttttacgctaccaagacgctcacgcacggtgtccagttctgcatcaaataccagcggttgtgcggccgccatattcagcacatcagtggttgaaggggtaatttgcgcgcgattctctgccagactccagctatggttgccattatccagcaaggtatattcatacgtaccgatatcaacaacgcctccggcattgcccaacgtaaatgcagcatcaccgccgcccgttgttaccagtgtaaggctatctcctgctgccgggctggcaccggtgtccgtcacgaatattttgaaatcacctgttgcctgaccggtgacgttgagctgatcgctctgatgattagccatatcggtacgcatataaaaattgccgtttcccgacagggtattggtggtcaacgtaatgaaattttccgcacttgccgtcactgatgaacgagtcactggctcatccatcataatcacatttgcgtcagacatcgcaaggttggctaagttgaggagggtgttttggttcgtcgtagtgatatcggcaatgatggtccatacgctattttcgagcgaaacgtccgctttgctggtatccacggcaccatgcgttctaaaagaagcgccctcagaaaccactaccttacccaccaacattgcgggtgcataatttatttgcggcttcatgacctcaagaatgccatcattccctctgactgaaacgttaaccattgtgccagcccagacgttagcgcggccattgttgataaccatattttcagagatggcttttgaggaatacgtgatacttccattctgatatgatcgaccgagatcatataccgcatttgcctgcactttcgtaccagtatcctttcccagcgattgcatagtggcatgcttatcaaggatagtatcaatggcctgcgtgtcctccataacaatgagcccggaaccatcatccagttcataattttttgacacaccatcttttatactaaattggcctttactgtttggaccactcacttccagcgcattcgttgagacaattaattttccgcctgcttttttatcaacgccagttacagtcccgccatccataacctccagtaagccgccactatctacagtggtattataagcgaagtcattttcttcaactcgcaaacttccgccgttttccaacaacatattattagcaataccattcttgatatcgaactgaccgagacggtttgttccgaatacctccatggcccgcgtggttgttttaatagcaccgcctgctttctgatctaccgcaaatgcaaatcccccctctttaacctccagtagtcctcccttttcgatagcgacaaagacggcccccccatctttttcaacgattaagcgcccgcctttaatcgtggtatcattcgctgcgccataaacctgtagcacaccattattgagcgtagtctggtttgccgcgccacccatttgaacaatttgataaccgtcatttaatactgagtattctgcggcgccattcatttcaatgtactgataccctccgttaatttcagtattattacttacaccaaattcttttatatgctgttctccgccaggattgattttcgtattattggcggtcccataaaccagctggatatctttttccaggacaacaccatcaactgtctcaccatactcaacagttgatgccaatgctatgggtgaatataacgctgtagccaccagaacagatattgcggaacgacaaagagaaacagaaccagattgatgcattgagctttcatcctatgaaattaattgctgttaaaagcattgggtacagaaaatacccatagctccatacccggagtcagtttttaaaaactgtttaaagaaatgcacaagtattgtgattgattttttagttgtttttcttgatgagaagctgatgcaaaattccgtctttataatgaaaatgatgccaaagcgaacgacaaggttgtagttttcactacatgtccatacataaaatggggtaacattcacgcgcctggtagcgttaccaacgctacgctcaaacataatgattctaataaaacctcagagactactatgcctgaagcaacgccttttcaggtgatgattgtggatgatcatccacttatgcgacgcggtgttcgtcagttactggagcttgatcctggctttgaagtggtcgccgaagcgggcgacggcgcgagcgctatcgatctggcgaatagactggatatcgacgtgatcttgctggatctcaatatgaaaggtatgagtggcctggatactctcaatgccttgcgcagggatggcgttaccgcgcaaattattatcctgaccgtatccgatgcctccagcgatgtctttgcgctgatagacgcaggcgcagacggttatctgttgaaagacagcgacccggaagtattgctggaagcgattcgtgccggagcgaaaggcagcaaagtctttagcgaacgcgtcaatcagtacttacgtgaacgtgaaatgtttggcgcggaagaagatcccttcagcgtgctgacggagcgcgagctggatgttctgcacgagctggcacaggggctgtcaaataaacagattgcctcggtgttgaatatttccgagcagacagtaaaagtacatattcgcaatctgctgcgtaaactcaatgtccgctcacgcgtggcggccaccattctgttcctgcaacaacgcggggcacaataaaaatagcccgatggatttatcatcgggctgagatttatgacaaacgcaaaactgcctgatgcgctacgcttatcaggcctacgtggatcgatcaatttattgaatttacacaattttgtaggccggataaggcgttcacgccgcatccggcataaactaagcgcactttgtcaacagtctagcccgatggcatcaccatcgggcctctttttatttactctcctgcggcgacaaatgttgcatcgcctgcgcgatactacgttcaatcaccgcacggcgagtatcgttggcaggtaagagtttcaacatcatctcccacgcggcaacggcttcgccaaatcgctgctgctcaaaggcattaaacgcatacatgcttagcacacggatattgctatggtccgttctcaccagctgacgtagcagttcaccgccgaggcggttgtcgttgggatcagatgaacgagtcaacgcttcagcgtatcccagtgcagcatcactgtttttcggatcgaggcgatacgcagtggcgtatgcatcggtggcgatactggcgttacccagcgccatgccaacgcggcccaacataatccagccttctatatctcccggatttttttgcagttgagtacgcatccccagcgcaagacgcgacatctcttcttcgttgagcggatcggctttcggatccagcgccctgtccagcaacgccggagcctgtgccgtggcctgctgccagattttcacctgctgataattgccagtctggtagtagctgacgccagccacaattaacgccaccacaatacccggcagataaacaacatatccggcacgcttaccttccggcacgctttgttcaggaaacgcttccggcaccacgcgtacccgacgccgcgagcgggcgtatatgacccaaccgccaatgccaatagccactactggcagcacccacagcagcacggtcagcggcgttaacggcggatcgtaagtgacgaagttgccgtaacgcgccaccatataatcgacaatctcttttttacttttaccttcctgcatcagttcatacactttctaacgcaggtcggtggcaatcatcgagttggaatcggcaatgctgttgttctggcatttcgggcagcgcagttcttcagtgagctgacggaactgttgttcctgtgcttcatctttaaactgcaacacatcgatggtcgccagcgctgagccggagatcatcagcatcagcacgcccaataaaaacctcattgtgcggcctccttactgtatttctcccacagcggcttgatctcttcttcccagacgcgaggattcagatcgcccgcatggcgatagcgaatgatgccgttgccgtcaataagaaacgtttctggcgcgccatagacaccgagatccagccctaacatgccatcgccatcaaacaggcttagcgcgtaaggattgcccagctctttcagccagctgattgccttctggcgatcgtctttatagttcatgccgaccacgcggatgccctgcgcagaaagctgattcagatattgatgttccgcacggcaggtcggacaccaggtcgcccagacgttaagcagtactggtttgccctgagtcagcacatccgcctgataaaactgccccggattgtccagtgattcgagacgaaacttcggcacaggcttgccaatgagcgccgattccagattggtcggatcatccccttcggcattacgcgccagctgccacagcagcgccgcggcaatcgccaggaagataatcaacggaattaacaatactttgcgcttcatacggcctccggcgcagttttttgcggactcacgcgcttacgatagcgaggatcaaacagacacagcagtccgcccaacgccatcatcagcccgcccgcccaaatccagcgaacaaatggtttgtagtaaagacgcacggcccacgcgccgttttccagctcttcaccgagggccgcgtacaggtcacgcgtgatgccgccgtcaattgccgcttcggtcatcatcgacccggcagtgttgtaataacgtttttccgcatacagcaccgtttccggcttgccatcgcgcgttacgccgatagtcgccacaccgccacgccagttcgggccagtcacctctttgacatcacggaaggtgaagcgatattcatgaatatcgacgctatcgccggacttcatgcgcacatcacgctcaacgctatagttctggctaaaggcaatgccaacaattgtcactgccagcccaaggtgagccgccaccatcccccaataactgaaggtggttttcgtgccgcgtgaaatacgtagagcagcttccgcaattgccagcaccgcaatccagcaggccattgccaggccgagcaccgtcatcgccacaactttgctttcgaacagccacggcaacagcagcgacagcaccagcgtagagatgaaggcgataatcaataaattgcggatcttacgcgggcgatcccgcccccagcgcaccagaggaccgacaccaagcagtagcgcaaacggcaccatcagccaggtaaacatggtgttgaagaacggttcgccaatcgaaatactgcccagtcccagttgcttatgcaccaacggcagcagcgtccccagcaacaccaccagcatcgcagcgaccagcaaaacattgttcgctaacagcaaagattcccgcgaccacagcgcattgtttacgcgtgagcgaactttgtgtccacgcgcggcaaacagcagcagcgaaccgccaatcaccagcaccataaaggcgaggataaacataccgcgcgccggatcagacgcaaacgcgtgtaccgataccagcacgccggaacgcacgaggaaagtccccaacagacacaacgagaaggcactgattgccagcagtaatgtccacgctttgaagctggcgcgttgttcagtgaccgccagtgagtgcatcagcgcagtccccaccagccacggcataaacgaggcgttttctaccggatcccagaaccaccagccaccccagccgagttcgtaataggcccatgcggaaccgagcacgatgccgagcgtcaggaagatccacgctgccagcgtccacggacgagtaaaacgcgcataagtgctgtccagacgcccgctcagcaaagaagcaatggcaaaagcaaacgccaccgagaaacccacgtaccccatataaagcagaggcggatggaagatcagccccggatcctgcaatagcgggttaagatcgcgaccttcaatcgggaagttcggcaacgtgcgagagaacgggttagaggtaaagagaatgaacagcaaaaagccgacactgaccatccccattatcgccagtacacgggccacaatatccagcggaatacgctgactaaaaatcgccaccgcaaaggtccagccgctcatcagcagcacccacagcagtagcgagccttcatgcgcgccccaggtagccgccacgcgataccacaccggaagctgggtattggagttgctggcaacataggtgacggtgaagtcgttgaccacgaaagcattgaccagcaccagaaatgcgccagccacagacataaacagcagccaggcaaacaagcgggaagacgccatcatgcgcgcatctccgcgcgccacgccccatagcggatacacggacagcagcagcgcaattcccagcgccaggcacagcagtccgttaccaatttctggcatcatgatgctgggtccttataaacactcgccgggcgacggtggttagcttccatcgctttctcaacttctggcggcgtatagttttcatcgtgtttcgccagcacttctttcgcgaggatatgattgcctttttccagttcgccctgcaccacaacgccctgcccttcacggaacagatccggcaaaatgccttcgtaagagacatccactgagccttcagcatcgtaaatggtgaaggtcactttcagcgaattgggatcgcgctgcacactacccggcatcaccatcccgccaacgcgcagacgctgaccgacttccggcatttgctgagtttcacgcttgccgtagagaatttcccccggcgtataaaagagatcgatattcgagcgcagcgcatatagcaccagaccgatagtcagcgccagccctgccaacacggcacaggcaatccacaagcggtttttacggcgaatattcatgcagcctcctgctgttgcgcagcacgtaaacgcgcctcacgcgcccgctgttgcgccacgccacgcagaattgcgcgatgttgcatcaccgagtgcacgaccaaaaccaccagcggaataacggtcatcaccaccgccagccagacaaaaaaggcgtaaccgcccattgcgaaaaattcattccaggaagcaaatgcaggggtcatttacggcctcttttcagtatcagttcactcacccacggacggcgtttttccatcagcaaaatcaaattacgcatccgcatcagcgtcagcgtggcagacaggagcaggaagccaaaaatcgaccagcgcagcggcgaacgcatcgccggatcgatactttgctgcatccgcgttgatccctgatgcagggtgttccaccactccacggagtaatgaataatcggcagattcaccacgccaatcagcaccaggatacctgccgcacggcccgccagacggcggtcgtcgaaggcgtgccacagggcaatcacacccacatacaaaaacagcagcaccagttcagaagtcagacgtgcatcccatacccaccaggtgccccacatcggttttccccatgcagagccggtaaccagggcaataaaggtaaacacggcaccaatgggggccatcgccgccaccgccaggttggccattttcatctgccagacaaggccaataaacgctgccactgccattgatgcataaatgcccatcgaccagatcgccgcaggcacatgcaggtagataatgcggtagctatttccctgctgataatcagccggagcaaagccgaatccccagatccagccgacggtaagcacgaccacactggcaattgccagccacggtataaaccagccacagatttgatacagccgtggtgggatcgccagttgatgcagtgttttccacatagtttcgataccagactcgaacaaaaatcagtaatccagcgttattgaatgctgattcgtaacgctgccgccgtcgcaaaaggacttaatgtcgcggtgcctgccagcaacgcgcctaaaattgccagatacccgtcaacgggcaaatgcatagaagccgcgtccatcgcggcggtggcaaagatgagtaatgggatagtcagcggtaacaccagtatgctgagcagcacaccaccgcgcttaagtcccactgtcagcgccacgcccggtgcaccgagaaagccaagcgtaggcgttcccagcagcagcgtcagcgccatcacttgccagccataaacatccattcccagtagcattgctaccagtggcgaaaggatgagtaacggcagaccggttaccatccagtgcgccatcaccttcgccagcacaacggcgggcaagggtaacggcaacaacatcaattgttcaagactgccgtcctgcaaatcgtcacggaacagtcgttccagcgccagcaaggatgaaagcagcgcagcaacccagataatgcccggtgcaatacgcgccagcagttgcggctccggaccgatactgagcggaaaaagggtaattacaatcaggaagaaccacagcgggttggcgatttcggcgctatggcgaaacgctacacgcagctcaagacggaaaatgcgccagaacatcatgcggccctcgtttgcgtcagtgaaatgcggcgaattttactttcagcaacgttgagcggctggtgggtagtcagaatcacaatccccccctgctccgtatgctgcgccatactctgggtcagacgatcgacaccgttaacgtcaatcgcggtaaaaggctcgtcgaggatccataacgtggcacgggtcagccacagacgcgctaaagcgacgcggcgttgttgcccggccgagagctgatttacaggaatatcttcgaatccggcaagcccggcctgcgccagggcttccagacattgtgcggtatcgccatcgcgatgataaaagtgcagattttctaacgccgtcagccgggttttgatccccggctgatggcctatccataacaggttttgatggtagctgtcgcgtacctgatgcaagggctgcccttgccagagaacctcgcctgcgtcagggcgagacaaccccgtcagcaaacggagaagcgttgtcttccccgcgccgttgctaccggtgatttgtacccactctcctgcgttcagcgtaaatgacaagccactaaataaggttcgttcatcccgctcacaaagtaactctctggcttcaagcatacccacgcaataaccctgttaaaaacctggctcgacttcacgcatatcgggcagcttgtgcgctatccctttatggcaatcaatacaggtttgcccatctttcaccgcctggtcatgcatcttcgcggcaaccgatttctgggcggttgtatccatatactcgaagttgtgacagttacggcactcctgcgagttattgtccttcatgcgccgccactcattctgtgccatcgtcagacgatgagcttcaaatttctgcggcgtgtcaataacgccaaaaattttaccatacagctctttacttgctttgagcttgcgtatcatcttcggcacaaactcgtgcggaacgtgacaatccggacaggtcgcacggacgccgctacggttgttgtagtgcacggaatccatgtattcctgatacaccgtgttgcgcatttcgtggcagctaatgcagaactcttcggtattggctttttccatcccggtgttaaagccaccccagaagacgatgccgccaacaaaaccgatcaacagcagcgtccccagcgccagacggctgggggtacgccaccatttccacaggcgcttaatcagaccaggcttacggtcagaatttcccataataacctcttatttcccgtaaccttttgatggggtaaaggtattccccacgattggcgcggtatcggcctgcggtacgtgacattgcagacagaaataacgacgcggagccacttccgcgcccactttgccgtcgctgtccataaagtgagtaggactgatacgcggcgcgccagtggtgcgatagctttcgacaccgtggcactgcaagcagcgattggtattggtcgttacctgataaccttcaacgctatgcgggatcattggcggctgattcacatagttcagcggcatccgatcctgctcttttggcatccgaatggccccttcctgtgtcccggatacttccggcgactggctaaaatcgacgccattagccgcccaaaccgcgccgcttaccaccagggccagcatcgccgtccattaacacagcgctttcttcaggtcatggcttttcatgatttcgctcccgaactccatcgtgtagttattgtaaatacatcctcagaacagacatccacgcagcgaccgcacgtcatgcaatcgcggctggtgacctgcaccgggctttgttcatccagcaccggggcacgtagcacatgcggttccgggcaaacatgaaaacaatccatacagcggttacatttctgccgatcggtggccgcaacggtaatcacacctttgctacccagcacgccatacagcgcgccaaccggacaaatgtgcccgcaccagccgtgttcaacgaccagtagatcaaataaaaacagcgcgagaataagcagcgcgccgctgccgaagcccattaccaggctacgccccatcagagaaacggggttgatccattcccaaatgagcgtgccagttaaggctgatcccaccagaatgaccaccaacagcacgtagcgaatgtggcgagggatcgtcgcagactgattgaggtcaaagcgcctgcgtaaccagttcgctaagtcggtaatcgggttcagcgggcagacccagctgcaaaataatcgctttcccgccagggcgtagagcacggtgataatcaccgcaccggtcaacgccaccgtggcaggcagatgaccactggcaagactttgcagcgtcatcagcggatcggtcagcggaacggtgtcgaataacaggctactgctgtagttgccgtgcaagatccacacaccaaaccatggaccgctcaaaaacatccccagcacgaagaactgacaaaggcgacgtaacaccagccaacggtgactgcgccaccagccttttttctccagcgcctcgcgcccggcgtcacgtttacgatttgccattgttcccctccagccagccgaagcggtaatggtgacctaactcccctttcgccagtgacagcggtaacaccttgattgccggttgttccagcacgcatactttttcgcacttaccgcaaccggtacaggcgtcgctgtgaaccgtcggcagaaagcgggcgtgcttaccggtacgcgtgttgcgctccagctccagggtgatggcctcatcaattttcgggcattcgcgataacaaacatcgcagcgcagcccctgaaagttgagacagttttcctggtccaccagtaccgccagccccatccgcgcgtcgtcgatcgattcaatctcacgatccagcgcaccgcttgggcacactttggcgcacggaatgtcctcacacatttcgcaaggaatatcccgtgcgacaaaatatggcgtgcccgccgacagaccagaggccagcgtcgccagttttaaggtgtcgtaagggcaagcctgaacacactgaccgcaacgcacacaggcactggcaaaggcgttctcgtttatggctccgggcgggcgcaaccgcacgccagatgcgcgtgcggtttgctgttgtaaccccagcgccacacccacggcagccagcccgcctgctgtgcgaacgacatcgcgcagaaagcggcggcgaccattttgaggtttcgctgaccgggacataatggcttacaccttctccagtttgaccgcgcacttcttgaagtccgtctctttcgagagcggatcggtcgcatccagcgtcagtttgttaaccaactgtgcggcgtcgaagaacggcatgtacaccaggccctgtggcggacggttacgaccgcgcgtttcaacaatcgagatcacttcgccacggcgagaaaccactttcactttgtcgccacagcgcagatcgcgcgctttcgcatccagcgggtgaataaacaggaccgcttccgggaaggcgcggtgcagttctggtacacggcgagtcatactgccggtgtgccagtgctccagaacgcgtccggtagagagccacaggtcgtactcttcatccggtgcttccgccgccggttcgaatggcagtgcgaagatcaccgctttgccatccggtttaccgtagaacttatagccttcgcccgctttcacgtacgggtcgttaccttcgctgtaacgccactgcgtttctttaccgttcaccaccggccagcgcagaccgcgcgctttgtggtagtcatcgaacggtgccagatcgtgaccgtgaccgcgaccaaaccatgcgtactcttcgaacagccctttttgcagatagaagcccagctcgcgggattcatcgttcagctgatcttccgccagttcggataccgggaatttgctcacttccggtgtggcatacagcacttcgtacagcgttttgccacgcagttccggtttcttcgccagcagatcttccggccatacttcttcagttttgaagcggcgggagaactggactaactgccagagatccgatttcgcttcgcccggtgcctgtacctgttgacgccagaactgagtacggcgttcggcgttaccgtaagcgccctctttctctacccacattgcggtcggcaggatcaagtcggcggccagcgcactgactgtcggatacggatcggagacgatgatgaagttgcgcggatcgcgccagcccggcatacgctcttcattgatgttcggcccggcctgcatgttgttggtacacatggtccagtaaacattcagtttgccgtctttcagcgcacggtcttgtgccaccgcgtgcagaccgattttcgccggaatggtgccgctcgggatattccacttcttctcgcagatatcacggtgtttctcgttggtcaccaccatgtccgcaggcagacggtgagcaaaggtgcccacttcacgcgcagtaccacacgcagaaggttgcccggtcagggagaacggaccgcaacccggctgggaaattttgccggtcagcaggtgcaggttgtagaccaggttgttagcccacacgccacgagtatgctggttgaagcccatcgtccagtaggagatgactttcttgttcggatcggcatacagctgcgccagttgttctaactggtctttcggcacgccggtcatttcggcagttttttccagcgtatactcggcaacgaaggctttgtaatcttcaaagctcatcggttcggaggcgtcagaacccggattcttcgctgctttttccagcggatgggtcggacgtaaaccgtagccgatgtccgtcgcccctttgcgcaggttaacgtgcttgctgaagaagtcctgatttatcgcattgttttgaatgatatagttggcgatgtagttcaggatcaccaggtcagattgcggcgtaaagatgatgccgttatccgccagctcgaagctacgatgctggtaggtagaaagcaccgccacggtgacgttctggttagagagacgacggttagtgatgcgcgaccagaggatcgggtgcatttccgccatgtttgcgccccacagcacaaacgcgtcagcctgctcgatgtcgtcatagcagcccatcggctcatccataccaaaggtacgcataaagccaactactgccgacgccatacagtgacgcgcgttcgggtcgatgttgttcgaacggaagcccgctttaaacagcttggacgcggcataaccttcccagatagtccactgaccagaaccgaacataccgatcgattccggccctttttctttcagggcggttttgaatttctcttccatcacatcgaaggcctgatcccaggtgattggggtaaattcgccttctttgtcatatttaccgtttttcatacgcagcagcggctgcgtcaaacggtctttaccgtacatgattttgggcaggaaatagcccttaatgcagttcaggccacggttaaccggtgcgtccgggtcgccctgacaggccaccacacgtccctgctgcgttccgaccagaacgccgcaaccagtaccgcagaaacggcacggcgctttatcccatttgatggcttcctgctgaccaacaacggcgcgggcaacgcccggcacgctgagaccggcagccgccgcagcggccgcaacggcgttagctttcataaagctacgacgactgagtttcatggtgtttcctcaccttgctcttcctgctggtgataaaccagcgacaccgccagcacgccctctacgttgcgtactgactcaatggtttggatcagcgtttcgctgtcttctgcttccaccaccacaatcaactgaccgctcggcgcgtcgctgacagcaacttcacagccgggaaaggcgttcagttgggtgctgatgtctgaaattcgttcgcttttggcctgcacgaccaggctgcaaacttgccagttagtgtgcatggagatactccgcagttatggctgataccggacagctggctgcacatgctccacatccgttgcaaagttggctattaagttgcggctggtagatcccggagagcgtcgggcgaaagataattgccattggctcacagctatcctgacagcggcggcattcaactgactgatacgccaggcacgcgtccccgatggtgaactgcaaatcccaggccctggtgtggcgcggagaaaatagcgattcggggcaagcctgcgcgcaggcgtaacagaagctgcactcgttatttttgaaattaacgctcggatagccgcccgcgccgcgttgcagaatgttgttttcacaagcattaatacaggcgtcgcagcgggtgcaatgggtcagaaaatgagattcatcaccggaccagggcggacggataccgttactggctttgcgccagcgaccagtgagtatgccccgacgggatgcatcaatcttcacattgaccttccatcattaacgcgctctgaaaattgagagcgaccaaataaaccgcataattaataagccatttttatagccgctaagatattaaaggatgtgtcaaagatgcataccccgatcggggtaaaacctgtagcaggatcaaaagagtggcgggaagcgtggcaaaaacgggcttttgctcacatttcaaatggttataaatatatttatatagcgattgattcaccagagatatttctgctggtttgctctctcattagaatttaacactaaaagagcaggtaaaattgtctgaatgttctttaagttattcataaagcaaattaataaatctgatgaatatgttaaccttcagcgacatcatcggtgaaaacctataaatgaagaaggaaagcaaaaaaatgaagaccattctacctgcagtattgtttgccgctttcgctaccacttccgcctgggcggcagaaagcgtccagccactggaaaaaatcgcgccttatccacaagctgaaaaagggatgaagcgtcaggtgattcagttaaccccgcaagaagatgaatctaccctgaaagtagaactgttaatcggtcagacgctggaagtcgattgcaatttgcatcgtctcggcgggaagctggaaaacaaaacgctggaaggctggggctatgattattatgtctttgataaagtcagttccccggtttcaacgatgatggcctgcccggatggcaagaaagagaagaaatttgtcaccgcgtatctgggcgatgctggaatgctgcgttacaacagcaagctgccgatcgtggtgtatacgccagacaatgtagatgtgaagtaccgcgtctggaaggcggaagagaaaattgacaacgcggtagttcgctaaactgccgtgaagtgcggcaccccgtaggtcagacaaggcggtcacgccgcatccgacatccaacgcccgagccggttgcctgatgcgacgctggcgcgtcttatcaggcctacaccgctgtgaagtgctccaccccgtaggttcggataaggcggttacgccgcatccgacatcaacgtcccaagccggttgcctcgaatccgcgacgctcggtcggccgtcttatcaggcctacaccgctgtgaagtgctccaccccgtaggttggataaggcggttacgccgcatccaacatctaacgcccgagccggttgcctgatgcgacgctggcgcgtcttatcagcatacgccacatccggcataccatgccggatgtggcgcatcattacaacgcaatatccgccacttctttttgaacgggttgcggtttcaactgcggtttcggcgtactatctgctgcctgcggcttgtcgtagttcaaccccagcacttcgctggtgtactgcaactcgcgttctgttgccgctacatcaccgttcagcttgcgtccataagacggaacgatcgctttcaacgtagcctgccattgcgggctggaaacacgatcgccaaatactttttccagcagattcaacataatcggcgcggcggttgacgcccctggcgatgcccccaggagcgcggcaatggttccttgctggtcactgacgacttcagtacccagacgcagtacgccacctttctcggcatcacgcttgataatctgcacgcgctgccccgcttgccacaaacgccagtcctcttttttcgcctgcggatagtactctttcaacgcttcaaaacgatcctcttcactcaacatcacctgactcaccagatatttcaccagatcgaaattatccagcccgacgtgcatcatcggcatcacgttagaggtggtggtggaactcattagatcccacaatgaaccgtttttgaggaatttggttgagaaggtggcaaatggcccaaacagcactacgcgtttaccgtccagaacgcgggtatcgatatgcggaaccgacatcggtggtgcgccaacggatgctttaccgtaaaccttcgccagatggtgattaaccacgtccgggttttccgaaacaaggaactgtccgcccaccgggaaaccggcgtagtctttcgcttccggaatccccgattcctgtaacagcttcagcgccgcaccgcccgcgccgataaagacaaatttggcacgaatgttctgtgcagtgccatttttcagatcggcaacggtaacggtccaggtgttatcgtcattacgctttagggcgcggacttcgctgctgagttgcagcgagaagttagatttcttctgcaaggaagcaattaactggcgggtgatctcgccgtagttcacatcggtaccaatttccgtacgcgtggctgccactttctgttgcggatcgcgcccttccatcactaacggtgcccactctttgatctgcgcgtgatcttcagagtaacgcataccgcgaaacagcgagctttgttgcaacgcggcgtaacgggcgcgcaggaaattgacgttatcctcgccccagacaaagctcatatgcggaacggtattgataaatgaacgcggagtacgcagcacgccgcgctcaacctggtgcgcccagaactggcgggaaatctgaaatgcttcgttaatggcgactgctttttcaatactgatgctgccatcggcgttttgcggggtgtagttcagttccatcagtgcagaatgcccggttccggcgttattccagccgttcgaactctcctgcgcgacaccctccaggcgctccaccatggtcatcgaccattcaggctccagctcgcgtaaataggtccccaacgtggcgctcataatgccgccgccaatcaacagtacatcagtttcctgctcctcggacgctttcgcttttgccgccatcgaaacggcattaagccccacggccatcgagaagagcatggcagtcacttttttcatcttgttaatgccttacttttagtcgctttattgcaggtgagatttgcgcggcatcgacggtaacacttaagtaacaacatttaaataatgtttataaattatattctaattttagaaacattataatttcgttgattaattatagggttattagaaatgaagggatttttagcatattgacctgacggcagcagtccgccaggtcagcgtcgtaatattatgccgtccgggcaacggcatcacgcgaagcggcatcgcgctcttcgcccgtcagctcgctaagttgcccattgcgcatttccagcaggcggtcggcgtggataaagtaatgatcatcatgactgatagcgaaaatagttttacccatctcctgcatcagcggcagcaacacctgataaaactcacgacggaagtgtggatcctgatccgccgcccattcatccagcaggataatatcgcgttcttctgccagcgccagcaacagcgccacgcgttttttctgcccttttgataacttcaggttaacaatacgcccgttgcttaactcaagcttatgagccattttcagctgcgccagccacttctcaaccagttgcgggttagcgggtttaccctccggccccagcagttgatcaaacagccagacatcggtaaacactgccgaaaacagtttgcgataatcttccggttgttcgccgctgacaggtttgccatccagcaagatttcgccgctttgtggctgatacaagcccgtcaacaacatcgccagcgtcgattttccgctaccgttgccgccaatcagaaacagcagctcgccacgtttgatggtgagattaatcggaccaacggaaaacgcgttatcctgataagcaaacgtcacgttacgcagctccagcgtttgccagttgggaaacgcctgcgggcgcggaaactctgctttgaaaggcgcgagcgcgaatttgttcagcttgttaaacgccacctgcgccgtcagcagcgtcggcaatgcgccaaccgccgaaagcagcggcgtacgcaggaataaaagcgtcaacgaataggtcgcggcaacgttggtatcagcccaaccgaggctgttcgccatccagaacaccaggccgattgcgcccagcatcatgatgtttgaccagttcacggcactaagatggaaggtgtctgcgcgaataatatggtggcgatactcttgcgcatcaggaatgtagaggttgttaaacacatactcggcgcgttcccggttcagagtcagctctttgcgcccttcaagtacagtttgaaaatccgtgtacagcttgtcttcggtttcacgcagggtcgccatatgtttgtacacccgcgccaccagcacaaaaccgccccagatggtgatcgccatccagatagccgttaccagcaacattttgcccgacagcatccacagatacgccgctgaaccgatagtgagaatgatcccctgcaccagttccggcagacgcacaaaagcaatggtgatattgcgcacatcgctggttaaccccgccagcaacgaggcgctaccgagttgttcaatgcgctcgacgtgagtatccagaatccgcttgataaattcactacgcagtcggtaaacgaagtgatgccccaaagtggtgagcgccagttgcgatccgagagtgactgccatcaacagcagcaataatcccagaaactccggcaacaccagcagactggtatccgccgtttcgataaggcgctgattgataaaagcaattaagccaatgcctaatgccgcactggcgaggcttagcgccatcacactgataaatggccagcgatactgccgccagacaagtacaagaagttccatgcagaaaacccggacaatgaattacagcccgcagtttaaacatcttcgcgcgcacagcaataataattcttatttttattcttttttacctgcctgacggaatgtcaggttgtagcggcagtcgatggtgagtggatgaaaccccgctttcaacggttgaataccgtgataaaacagccgcgattcaccgccccataccaccacatcgccatgttccaacaacaaacgtttgagcggatcatttcgtttcaggccgccaaattgaaaaatcgcgggtaagcccagagaaacagaaacaattggcgcgcgcagatccggttcgtctttatcctgatgcagcgacagtttcgcgccaggagcgtagcggttgataagacaagcatctggctggaaatctggatagcccgccgccgtagccgcacgttgacataaattatgaaaactctgtggcatggcgggccacggtttatttgtttgcggatcaatgggcgaatagagataaccttgccgatgggtcgtccagcccagatgcccacagttggtcatcgccaccgacatggtatatcccccgggggtgaccatctggcgaaacggcgactggctggcaacgtcattaatatcgcggatcagttgctccgcagcgttaaaagcaaaacgccgtaaaattaccgcaccagccgccagtggctcttgccacggttcagcatcggcaaacagatccaacattacctctcctcattttcagcttcgcggcgcagcagttgcgctttacgcgacacgccccagcggtaaccggaaagtgtgccatcaccacggaccacccgatgacagggtattatgatagccagcttgttggcggcacaggcgctggcaacggcccgtaccgctttcggtttgccgatggcgttagccagttgctgataactgacggtttcaccgcaaggtatcgtgcgcagtgcctgccagacttgttgctgaaaagcagtgccgcgaatgtccagcggtaacgtcagcggcgtatcgcgttgattgaggctggcgatcacttcacgcacatgttgctgaaacatcagatcggcaggcgcgttgtcggcagcgggaaacatctgctgcaactcgctgattagtgtcgcgtcatcatcgcccagcaatatcgcgcaaatcccccgctcgctttctgccaccaggcaacgacccagctcacaatcagccagcgcgtaacgcaccgccagattttcgccaccgtgacggaattgtttagccgtcatgcccagcgtttcgtcagctttgcgatagtaactgctgctgtcggggaatccggcgttaagaatagacgtcgtcacgctctcccctttcgccagcgattcgcgcaaacggcgagcgcgccaggcctgttgccaggctttaggcgtcattccggtagtcgctttaaacaaccgatgtagatgaaatggactcatcgccacctggtcggctaaggcttccagcgttacaggcgtttcctgttccagcagtcgacacgcgtgggtgattttatccaaccgatgttgctgggcattggctttttctggctgacaacgtttgcaggggcgaaagccagcggcgagtgcctcgctggcatttgcgtagaaggagacgttttcccgcaaagcatgtctggcgcggcaagacggacggcaaaagatgcctgtggtacgcacggcgaaaacgaattcgccgtcggcattcgggtcgcgggctaagacagattgccagcgttgatcgtcagttaagcatgtggcttttttcataatcagctccctggttaaggatagcctttaggctgcccggtcaccatcacgcaaaaaccaacaatcttgcgctttaatttttttcgctgacaaggaagcttttaaactgtggtgacatccaggttttaaagctatcgccttctttggtgatcatataaaccgccagcccttcccggcgaacaacctctttagctttctccggcccgagtaccatcaagccagtatcccaggcatcggcttccagcgccgtcggagcaatcaccgtcacggataccagattgtgttcgatgggacgcccggtttgcggatcgataacatgggaaagacgtttgccgtccagttcgtaatagttacggtagctgccagaggtgctaatcccatgaccgttgatatccaccacagcctgaaccgcgttttctttatcggttggtttttgaatcgctacccgccacggcaggccttcaccgttcataccacggctgttcagcgcgccgcccaccgacaccagatagcgggaaatcccttcctgctccatcaagcgtgccaaatgatcggccgcatagccttcgccgacggtggagagatcgacatataaatccggcaggtctttttgcagatattgctgatgcgactgattgatgaccgtcaggtgctgtaagccggttttggctttcatcgcatcgatctgttcctggctcggaatttgaaccggctgttgttccgggccaaagccccacagattcaccagcggcccgacggttatatccatcgcgccatcggtcttcgcgccaatgcgcagcgaggtggtgacgatatcggccatcgcttcacttaccggccacggcgataaactttgcgagtcgttaaagcgcatcagcgcggaatcttttttataggtcgaaagcagctgatcgtcggcgtccagttgggtctgaatcttttctttaagttcggcgctgcgtttggcgtcaatgcccgggatgctggcacgccagaaggtacccatagttttgccttcaagaacggtaacttcagtagcgtgggttttggcgggttgtggtttttgatcgcaaccaacaaagaagagcgcggcagccagcagtgccacgcgggtaaagcttatttccatacgtgattatcctcatgcgaacggtcgcaagagtacaccaaaaaactgagtttgtacgctgaaaacaatgaaaaaagggcccgcaggccctttgttcgatatcaatcgagattagaactggtaaaccagacccagagctacgatgttatcagtgttgatgccagcgtcacgagtgaactggttgtcgtccagcaggttgattttgtagtcaacgtaggtggacatgtttttgttgaagtagtaggtagcaccaacatcaacatatttcaggatatcttcgtcgtcgtagccacgacccaggtttttacctttagactgcaggtaagccagggacggacgcagaccgaagtcgaactggtactgagcaacagcttcgaagttctgtgctttgttcgcccaacccagggaacctacgcgagttgcgttgtaggtctgggtgtactgagcagccaggtagatgttgttagcgtcgtatttcagaccaccagtgtaggtttcagcacggtcgccgttaccgatgtaagcagcggtgttctgagcatcagtacgtttggagctggagatcgcaccaccgataccgaaaccttcgtaatcataagtgatagaaccgccgacgccgtcgccgttttgacgcagtgcgtcacgaccgttgttagttacgccactagtaaagccttcaccagatgggttgccgtttttaccctggtactgaacagcaaagttcaggccgtcaaccagaccgaagaagtcagtgttacggtaggtcgcgaagccgttaccacgctgctgcatgaagttgtcagaaccgtaggtgtcaccaccgaattctggcagtacgtcggtccaggaagttacgtcataaacaacgccgtagttacgaccgtagtcgaaagaacccacatcctggaatttcagacctgcgaatgccacacgggtccaggagttgttttcgttttcagcgctgttgccctggatctgatattcccactggccgtaaccggtcagctggtcagtaacctgagtttcacctttgaagccaagacgcatgtaggtctggtcgccatctacatctttgttgtcagagaaatagtgcaggccgtctactttaccgtacagatctaatttgttgccgtctttgttgtaaacttcagcagcgtttgctgcgcctgctaccagcagagctgggaccaggagggacagtactttaactttcatgttattaaccctctgttatatgcctttatttgcttttttatgccactgcatactgattaaccctcattaatcagtcggcaagtccattctccccaaaaatgcagaataatccaacacgaatatgatactaaaacttttaagatgtttcatttatcgctatagatgtttcaaaatgtaaatgcaagggaactttttaagattattgcggaatggcgaaataagcacctaacatcaagcaataataattcaaggttaaaatcaataacttattcttaagtatttgacagcactgaatgtcaaaacaaaaccttcactcgcaactagaataactcccgctatcatcattaactttatttattaccgtcattcatttctgaatgtctgtttacccctatttcaaccggatgcctcgcattcggttttttttacccttctttacacacttttcattattctgtgctaccacagaaaaactataacgcttgttaactatttcacaaataattaacatccgcataatttccagcaatctttgtttatttgcaattatttttgttgggctttttgtaggttatttgtacagcaaaatggcgcttgtacatctatttcccccaatgcaggatgataaatatcacgggagaatagagaatcatcaatcaggtaagagtctggaatttcacactgtaccctttatactgccctatcacttcgcgaagttttaacaggtcataaacacgaatgcgtcagaaagagacaacggccacgacccgcttttcactcctaccggggagcattacccgcttctttttactgttgatcattgtgttactggtgacgatgggtgtaatggtacaaagcgccgttaacgcctggctgaaagataaaagttaccagattgtcgacattacccatgctatccaaaagcgcgtcgataactggcgttacgtgacctggcagatctacgacaacattgccgcgacgacctccccctcctccggcgaaggtttacaagagacgcgcctgaaacaggatgtctactatctggagaaaccacgccgcaaaacggaagcgttaatctttggctctcacgacaactcaacgcttgagatgactcagcggatgtccacttatctggatacattgtggggcgcagaaaatgtaccgtggtcgatgtattacctgaatggtcaggataacagtctggtgctgatctcaaccctaccccttaaagatctcacctccggatttaaagaatcgaccgtcagcgacattgttgattcacgtcgtgcagagatgttgcaacaggccaacgccctcgatgaacgcgaaagcttttctaacatgcgccgcctggcctggcagaacggtcattactttacattgcgtactacctttaaccagccaggacatctggcaacggtcgtggcttttgatctgccgattaatgatttgatcccaccgggtatgccgctggacagtttccgccttgagccagacgcgacggcaacgggaaacaatgataatgagaaagaagggacggatagcgtcagtatccactttaacagtacgaagattgaaatctcctcggcactcaactctaccgatatgcgcctggtctggcaggttccttatggcaccttattgctggatacgttgcaaaacattctgctgccactgctgctgaacatcggtttgctggcgctggcgttatttggctataccacattccgccatttctccagccgcagtacagaaaacgtccccagcacggcggtcaataacgaattgcgcattttacgggcaatcaatgaagagatagtctcactgctgccgctcggcctgctggttcacgatcaggaatcgaaccgcactgtcataagtaacaaaattgccgatcatttgctgccgcatttgaatctgcaaaacatcaccaccatggcggaacagcatcaggggattattcaggcgacgatcaataacgagctgtatgagatccgcatgttccgcagccaggtcgcgccgcgcacacaaattttcattattcgcgatcaggatcgcgaagtgctggtaaacaagaaactcaagcaggcgcagcgtctgtatgagaaaaaccagcaggggcggatgatctttatgaaaaacattggcgatgcgctgaaagaacccgcacagtccctggcggagagcgcggctaaactcaacgccccggaaagcaaacaactggcgaatcaggcagatgtgctggtgcggctggttgatgaaatacagttagcgaacatgcttgcggatgatagctggaaaagtgagacggtgctgttctccgtgcaggatttaattgatgaagttgtgccttcagtgttgcctgccatcaagcgtaaaggtctgcaactgctgattaacaatcatctgaaagcacacgatatgcgccgcggcgatcgcgatgccttacgacgtattttgctgctactgatgcaatatgccgtgacctcaacgcaattgggaaaaatcacccttgaggttgatcaggatgagtcctccgaagaccgcctgacgttccgcattctggacacgggagaaggcgtaagtattcatgaaatggataatttgcacttcccgtttatcaaccagacccaaaacgatcgctatggcaaggcggacccgctggcattctggctgagcgatcaactggcacgtaaactgggcggtcatttaaacatcaaaacgcgggatgggcttggtacacgctactctgtgcatatcaaaatgctcgcagctgacccggaagttgaagaggaagaagagcgtttactggatgatgtctgcgtaatggtggatgttacttcggcagaaattcggaatattgtcactcgccagttagaaaattggggtgcaacctgtatcacacccgatgaaagattaattagtcaagattatgatatctttttaacggataatccgtctaatcttactgcctctggcttgcttttaagcgatgatgagtctggcgtacgggaaattgggcctggtcaattgtgcgtcaacttcaatatgagcaacgctatgcaggaagcggtcttacaattaattgaagtgcaactggcgcaggaagaggtgacagaatcgcctctgggcggagatgaaaatgcgcaactccatgccagcggctattatgcgctctttgtagacacagtaccggatgatgttaagaggctgtatactgaagcagcaaccagtgactttgctgcgttagcccaaacggctcatcgtcttaaaggcgtatttgccatgctaaatctggtacccggcaagcagttatgtgaaacgctggaacatctgattcgtgagaaggatgttccaggaatagaaaaatacatcagcgacattgacagttatgtcaagagcttgctgtagcaaggtagcctattacatgaacaatatgaacgtaattattgccgatgaccatccgatagtcttgttcggtattcgcaaatcacttgagcaaattgagtgggtgaatgttgtcggcgaatttgaagactctacagcactgatcaacaacctgccgaaactggatgcgcatgtgttgattaccgatctctccatgcctggcgataagtacggcgatggcattaccttaatcaagtacatcaagcgccatttcccaagcctgtcgatcattgttctgactatgaacaacaacccggcgattcttagtgcggtattggatctggatatcgaagggatcgtgctgaaacaaggtgcaccgaccgatctgccgaaagctctcgccgcgctgcagaaagggaagaaatttaccccggaaagcgtttctcgcctgttggaaaaaatcagtgctggtggttacggtgacaagcgtctctcgccaaaagagagtgaagttctgcgcctgtttgcggaaggcttcctggtgaccgagatcgctaaaaagctgaaccgcagtattaaaaccatcagtagccagaagaaatctgcgatgatgaagctgggtgtcgagaacgatatcgccctgctgaattatctctcttcagtgaccttaagtccggcagataaagactaatcacctgtaggccagataagacgcgttagtgtcttatctggcatttgcaccgattgccggatgcggcgtaaacgccttatccggcctacgattcccattatttcaacaaattacattaaagtaggccagataagacgcgtcagcgtcgcatctggcatttgcactgaatgccggatgcggcgtaaacgccttatccgtcctacgaatcccgcgatttcctgaccctctcggcatataacgtcagcgtctgttttatcacatccagcgttaccggcttcgacaggcagctgtccataccggactccagacaccgctgcttctcttcagccaacgcattagcagttactccgattaccggcaacgtcagtcccaactgacgaatgcgttgcgtcaagcggtaaccatccatatttggcatgttgacgtcgctaagcacgatatcaatatgattcttgctaagtacattaagcgcatcgacgccatcattcgcggttttacattgatagcccaacgatcccaactgatctgccagcaaacgccggttaatcggatgatcatccacgaccagaatcatcatatcgtcattatcgctgaccgctttgtccgttgacggcagagcgttagcaggatcgtcgctctccatctcgatcaaataaatacgcgccaacaatgccggtagctcatgcggagcagccacactgtgtacccactcccctggcgctttctccagcggaataccaatatggcgacgacagaaggtcactaccgctctgccctgccattttttactcactacctcgtcagtgatcaacacatcttcgggagtcggttcctgcccttcgtatgttgtaacgacgatgccgctgcgctgcaaactggtttccaggaactgacagagcgacgcattgcggaccgccagccagcagcgtttaccactcaacccttccacgccttttttctgcgggtactgagcgccgtacaacggaatacgcacggtaaactggctgcccattcccggttctgaatctaccgagatatcgccgtccatcatgctgatcagtttttcacaaatcgccagacccagaccggtcccctggaaattacgctgtacgcccgttccgacctggaagaagggatcaaacaagcgcaccacttctttcgccggtatccccacgccggtatcgcgaacacggatagagagataatcgccatccgcgcgaacatgcaaaactatacagccggtatcggtgaattttatggcgttactcaacaggttggagatgacctgctgtaaacgcatcgggtcgccatttaaggccactggcacatccggttcaataaagcagtacaagcctaactgcttgcgtaccaccagcggtaaatagttggcggtgatgtggttcatcacttcacgcggtgaaaactcacgcggttcgatcttcaactgttccgattcaatcttcgagaaatcgagaatatcgctgataattttcaacaacaggctggaagagttgttcattgccgtcaccagccgatcgacgcctttcggtaactctttggtttgcaacagatccaggttaccgataatgccatacagcggcgttcgcagctcatgactgacggtggcaaggaacatcgattttgactggctcgcctgttccgctgcttgtgccatctcctgcaacgactcttccatcttcacgcgcgaagaaacatccaccagcacacaaatggccacgttttcattacgatagcgcgaatggacgaagctgatttgcagattggtattgttgctggtcaggacatcaacaaaattgacctgctgcccacagataatttgcgtcagtcgttggcggtcctcatgcgtaagcatattgagataggtatgcgccagttcgttacttaaaatattgacgccatcagcggtacgcaaaatgcagatacccactggcgcggaggcgacaatcttgcgattgaactgctcatgttcttccagtcgcagggcgtcgctttccgccggaatgaaaatacgtcgctcgtacatccgtgcgagagtaaacaatgcagctccggcaagcacattcagcaaaattgcgttaaggatcaacatgcgaatgcgttccagcaccttatcaaccggcaccgaatacacgatgcttagcgatgagggtggcagatttttcttcagcaccagctcccggaacccttccgtatagccaaaccaggagcgttcctgcatccagcgaggatcgcccttaattttactttctggtccggtaagcgaaatcagggtatgaccattttcatcaagaatggtaacccccatcggcaacgtacccggtaagaaaaagttctccatccggatggtctgctcgacacccaaaagcgcctgcaaccggttcgccagataaactggcgtcaacgcgtaaaaatacccgacgccagggcgcggaccttcgctgatccagtagaggttactgccgctatcatcttgtggtgcatttcgatatttattgatgcgttcatgcaaagctttcaacgcggtatcgcgttccactggcatatcacgcagaccgaaattggccatgcagaggttatcgctgccgattaaaaatacccggtttagatcgtaagccgcagaaaaattatcgcgccagtagcgcataaaccacgccaatgactccagagaacctcgccaggtgttactcattgcggaacaatcggagtcggcaaacagcggttcaaacgcaggcacatccgcctgcgtttctcgtccacgcggggaaagcacaccgttttctgccgataagcgattttcggcgatgtacttcagctctttcatcacatcagaggtgcgttgaataaagcgctgagcctgatcggaactcagattaaattcctgacgaatttccgattctcgctgatgtaacgcattaacgatgtaaaaaacggatgaaaaagcaatcaacagccagagcactaacgccaatgctctgaacatgtagcgcgaggctttcagggttgtacgaaaagaagcaaggtatttcaaaggggcgaagctccgcctcaggtgaccgatggagtgtggttaaggtagcggtaaaagcgtgttaccgcaatgttctctcttctctggaatatgatacaccgccgagaaatcatcaccttaacctctgataatcgtcatataccggacaagactagtggatttcagcatgcattatatgaagtggatttatccacgccgcttacgcaatcaaatgatcctgatggcaatcctgatggtcattgtcccaacgcttactattggttatatcgtagaaacggaaggacgttcagcagtcttatctgaaaaagagaaaaaactttctgccgtggtcaacctgcttaatcaggcactaggcgatcgctatgatctctacatcgacttaccacgtgaggagcgtatccgcgcattaaatgcagaacttgcccccattaccgaaaatatcactcacgccttccctggcatcggtgctggttattacaacaaaatgctggatgcgataatcacctacgcgccttcagcgctatatcagaataatgtcggcgttaccattgccgcagatcaccctggtcgcgaagtgatgcgtacaaatacccctttagtttattcaggcaggcaggtgcgcggcgatattttgaattcaatgctccccattgagcgtaatggtgaaatcctcggctatatctgggccaatgaattaaccgaagatattcgccgccaggcctggaaaatggatgtgaggattatcattgtgctcaccgctggtttgctgataagcctgctgttgattgtccttttctcccgtcgcctgagcgccaatattgatatcatcaccgatggcctctcgactctggcacaaaatattcccactcgattaccacaattgcccggtgaaatggggcaaatcagtcagagtgttaataacctcgcccaggcactgcgtgaaacgcggacacttaacgatctgattattgaaaacgctgccgatggcgtcattgccattgaccgccagggtgatgtaaccaccatgaacccagcagcagaagttatcactggctatcaacgccatgaactggtagggcagccttactccatgttgttcgacaatactcagttctacagtccagtactggatacgctggaacatggcaccgaacatgtggcgctggagatcagttttccaggtcgtgaccgcaccattgaactcagtgtcactaccagtcgtattcataacacgcacggtgaaatgataggtgctttggtgattttctctgatttaactgcccgcaaagaaacccagcgccgcatggcgcaagcagaacgcctcgccacactgggtgagctgatggctggcgtcgcgcatgaagtacgtaatccgttaacggctattcgtggttatgtacagatcttgcgccaacaaaccagtgacccaatacatcaggaatatctgtccgtagtactcaaagaaatcgattcaattaacaaagttattcagcaattgctcgaattttcacgtccacgccacagtcaatggcaacaagtcagcctcaatgcattggttgaagaaactctggtactggtacaaaccgccggcgtacaagcgcgggtcgacttcataagcgaactggataatgaattaagcccgattaacgccgatcgtgaactgctcaaacaggtactactgaatatcctgatcaatgccgtccaggctatcagcgcacgagggaaaattcgcattcaaacctggcaatacagcgactcacaacaggccatttcgatagaggacaacggctgtggcattgatctctcgctgcaaaaaaagatcttcgatccctttttcaccaccaaagcctcaggaaccgggcttggtctggcgttaagtcaacgcatcattaatgcccatcagggtgatattcgcgtcgccagtttgccgggctacggcgcaaccttcacgcttattttaccgatcaacccgcagggaaatcagactgtatgactgctattaatcgcatccttattgtggatgatgaagataatgttcgccgtatgctgagcaccgcttttgcactacaaggattcgaaacacattgtgcgaacaacggacgcacagcattacacctgtttgccgatattcaccctgatgtggtgttgatggatatccgcatgccagagatggacggcatcaaggcactaaaggagatgcgcagccatgagacccggacacccgttattctgatgacggcctatgcggaagtggaaaccgccgtcgaagcgctacgctgcggagccttcgactatgttattaaaccgtttgatctcgatgagttgaatttaatcgttcagcgcgctttacaactccagtcaatgaaaaaagagatccgtcatctgcaccaggcactgagcaccagctggcaatgggggcacattctcaccaacagcccggcgatgatggacatctgcaaagacaccgccaaaattgccctttctcaggccagcgtcttgattagcggtgaaagcggcaccgggaaagagttgattgccagagcgattcactacaattcgcggcgggcaaaggggccgttcattaaagtcaactgcgcggcgctgccggaatcgttgctcgaaagtgaactgtttggtcatgaaaaaggtgcatttactggtgcacaaaccttgcgtcagggattatttgaacgagccaacgaaggtactctgctcctcgacgaaattggcgaaatgccgctggtactacaagccaaattactacgcattctacaggaacgggaatttgaacggattggcggccatcagaccataaaagttgatatccgcatcattgctgccaccaaccgcgacttgcaggcaatggtaaaagaaggcaccttccgtgaagatctcttttatcgccttaacgttattcatttaatactgccgcctctgcgcgatcgccgggaagatatttccctgttagctaatcactttttgcaaaaattcagtagtgagaatcagcgcgatattatcgacatcgatccgatggcaatgtcactgcttaccgcctggtcatggccgggaaatattcgagagctttccaacgttattgaacgcgccgtcgtgatgaattcaggcccgatcatttttctgaggatcttccgccacagattcgtcagccagtctgtaatgctggcgaggtaaaaacagcccctgtcggtgagcgtaatttaaaagaggaaattaaacgcgtcgaaaaacgcatcattatggaagtgctggaacaacaagaaggaaaccgaacccgcactgctttaatgctgggcatcagtcgccgtgcattgatgtataaactccaggaatacggtatcgatccggcggatgtataacaccaaaacttgctatgcagaaatttgcacagtgcgcaattttctgcatagccgctcattctccttataaatccccatccaatttatcccttcatattcaattagttaaataactaaatccaataatctcattctggcactccccttgctattgcctgactgtacccacaacggtgtatgcaagagggataaaaaatgaaaacaaaattgatgacattacaagacgccaccggcttctttcgtgacggcatgaccatcatggtgggcggatttatggggattggcactccatcccgcctggttgaagcattactggaatctggtgttcgcgacctgacattgatagccaatgataccgcgtttgttgataccggcatcggtccgctcatcgtcaatggtcgagtccgcaaagtgattgcttcacatatcggcaccaacccggaaacaggtcggcgcatgatatctggtgagatggacgtcgttctggtgccgcaaggtacgctaatcgagcaaattcgctgtggtggagctggacttggtggttttctcaccccaacgggtgtcggcaccgtcgtagaggaaggcaaacagacactgacactcgacggtaaaacctggctgctcgaacgcccactgcgcgccgacctggcgctaattcgcgctcatcgttgcgacacacttggcaacctgacctatcaacttagcgcccgcaactttaaccccctgatagcccttgcggctgatatcacgctggtagagccagatgaactggtcgaaaccggcgagctgcaacctgaccatattgtcacccctggtgccgttatcgaccacatcatcgtttcacaggagagcaaataatggatgcgaaacaacgtattgcgcgccgtgtggcgcaagagcttcgtgatggtgacatcgttaacttagggatcggtttacccacaatggtcgccaattatttaccggagggtattcatatcactctgcaatcggaaaacggcttcctcggtttaggcccggtcacgacagcgcatccagatctggtgaacgctggcgggcaaccgtgcggtgttttacccggtgcagccatgtttgatagcgccatgtcatttgcgctaatccgtggcggtcatattgatgcctgcgtgctcggcggtttgcaagtagacgaagaagcaaacctcgcgaactgggtagtgcctgggaaaatggtgcccggtatgggtggcgcgatggatctggtgaccgggtcgcgcaaagtgatcatcgccatggaacattgcgccaaagatggttcagcaaaaattttgcgccgctgcaccatgccactcactgcgcaacatgcggtgcatatgctggttactgaactggctgtctttcgttttattgacggcaaaatgtggctcaccgaaattgccgacgggtgtgatttagccaccgtgcgtgccaaaacagaagctcggtttgaagtcgccgccgatctgaatacgcaacggggtgatttatgattggtcgcatatcgcgttttatgacgcgttttgtcagccggtggcttcccgatccactgatctttgccatgttgctgacattgctaacattcgtgatcgcgctttggttaacaccacaaacgccgatcagcatggtgaaaatgtggggtgacggtttctggaacttgctggcgtttggtatgcagatggcgcttatcatcgttaccggtcatgcccttgccagctctgctccggtgaaaagtttgctgcgtactgccgcctccgccgcaaagacgcccgtacagggcgtcatgctggtcactttcttcggttcagtcgcttgtgtcatcaactggggatttggtttggttgtcggcgcaatgtttgcccgtgaagtcgcccggcgagtccccggttctgattatccgttgctcattgcctgcgcctacattggttttctcacctggggtggcggcttctctggatcaatgcctctgttggctgcaacaccgggcaacccggttgagcatatcgccgggctgatcccggtgggcgatactctgttcagtggttttaacattttcatcactgtggcgttgattgtggtgatgccatttatcacccgcatgatgatgccaaaaccgtctgacgtggtgagtatcgatccaaaactactcatggaagaggctgattttcaaaagcagctaccgaaagatgccccaccatccgagcgactggaagaaagccgcattctgacgttgatcatcggcgcactcggtatcgcttaccttgcgatgtacttcagcgaacatggcttcaacatcaccatcaataccgtcaacctgatgtttatgattgcgggtctgctgctacataaaacgccaatggcttatatgcgtgctatcagcgcggcagcacgcagtactgccggtattctggtgcaattccccttctacgctgggatccaactgatgatggagcattccggtctgggcggactcattaccgaattcttcatcaatgttgcgaacaaagacaccttcccggtaatgaccttttttagttctgcactgattaacttcgccgttccgtctggcggcggtcactgggttattcagggacctttcgtgatacccgcagcccaggcgctgggcgctgatctcggtaaatcggtaatggcgatcgcctacggcgagcaatggatgaacatggcacaaccattctgggcgctgccagcactggcaatcgccggactcggtgtccgcgacatcatgggctactgcatcactgccctgctcttctccggtgtcattttcgtcattggtttaacgctgttctgacggcacccctacaaacagaaggaatataaaatgaaaaattgtgtcatcgtcagtgcggtacgtactgctatcggtagttttaacggttcactcgcttccaccagcgccatcgacctgggggcgacagtaattaaagccgccattgaacgtgcaaaaatcgattcacaacacgttgatgaagtgattatgggtaacgtgttacaagccgggctggggcaaaatccggcgcgtcaggcactgttaaaaagcgggctggcagaaacggtgtgcggattcacggtcaataaagtatgtggttcgggtcttaaaagtgtggcgcttgccgcccaggccattcaggcaggtcaggcgcagagcattgtggcggggggtatggaaaatatgagtttagccccctacttactcgatgcaaaagcacgctctggttatcgtcttggagacggacaggtttatgacgtaatcctgcgcgatggcctgatgtgcgccacccatggttatcatatggggattaccgccgaaaacgtggctaaagagtacggaattacccgtgaaatgcaggatgaactggcgctacattcacagcgtaaagcggcagccgcaattgagtccggtgcttttacagccgaaatcgtcccggtaaatgttgtcactcgaaagaaaaccttcgtcttcagtcaagacgaattcccgaaagcgaattcaacggctgaagcgttaggtgcattgcgcccggccttcgataaagcaggaacagtcaccgctgggaacgcgtctggtattaacgacggtgctgccgctctggtgattatggaagaatctgcggcgctggcagcaggccttacccccctggctcgcattaaaagttatgccagcggtggcgtgccccccgcattgatgggtatggggccagtacctgccacgcaaaaagcgttacaactggcggggctgcaactggcggatattgatctcattgaggctaatgaagcatttgctgcacagttccttgccgttgggaaaaacctgggctttgattctgagaaagtgaatgtcaacggcggggccatcgcgctcgggcatcctatcggtgccagtggtgctcgtattctggtcacactattacatgccatgcaggcacgcgataaaacgctggggctggcaacactgtgcattggcggcggtcagggaattgcgatggtgattgaacggttgaattaatcaataaaaacacccgatagcgaaagttatcgggtgttttcttgaacatcgacggcgaaggtaaccccattaatcaccagtcaaaacttttcaccagcgtcagctcgccagcattacgcatcggtacaataaatgtttcctgtttctcattgaccgatccttcatcggtgatcagcgtcagttgggcggtggttaattccgtttcgctgcgcccaccatagtagttgatatacacctgatagcgcccgtgaattggcgcgggcatggcgaaaatctcgggtccgtaccccgtcgtgacatccatatccagtgcaccactgtttttcagcacggtgttaccgtaccaggcgtgttcgccatcgggcgtaacaacgtgaaggtcgaggtcggtattgtccgtatcccacgagagaaccagccgtaaacgtgcacgaatcgttcctgtacccggcgttgagtaaaactgcattttttgtcggctttgcccatccgggctgatgacctgcacgctgttgctgccttcagtgaaaatataagggcgtgcaaatgaaccatcggattcaattctctgcggcatactggcaccgttgaccaccagccggccctgctgaactttacccgccgcagcataattctttattttgccgcggatctgcgctgagatattttgatcatctgccatgttgacggacgacgccgggtaattgatcgattgtgaaaaactggcatcttcgccctctgccggatgccagcctgagagcggtgcatcaatctcgacttcctgcacaccttcactgtgagcgacaggcgaaagcgccaccagtaacaacggaagaaaaatctttcgcatagcattagtccattaataattgtcgggtcagcgtttcgatatagttctcatcaagcccggtgggataaccatcaaaggccaggtgcagatactcatgggttaaatccagccgatcctgaagcgtaaagaagttacgaataaacagccgtttctgctgccgatcggtataggggaaacctgagactaaacggcaaaccgcaaacacgtctggttcgttgtaccccgtctcagcttgtaatatacgccgccactgcggcatttttttcgccagccaggctttcgctttgggtaataactggcaggttgagcgtggcgctccccagcggctaagactgttgtcgggataagcaaacgcgagtatctgatcgtaacgctctccctgccccgcctgggccgtggcttgccgccagaaaagtgtcccttcggtagcgcgactgccatgataatgaaccggatcgcctgcatagatgagatcctgcgtccaggcggtcatcgttcgcgcccccgtggtcgctggcgaagcagaaacacgctgcgtggcgctgctgtcggggatgatcaggcaatcgccttcccgattggcgttttgctgtaaaaaagtgcgaatcgccacggtcatggctttcgctgcctcagggggcgtacttttcgcctcgcgatccagaactctggcaacgtactcttcacgatcgagatgcgactgcaatttcagtttgcccttttcgctcagtaaggtcgtctcaccgtggctgacaaacgtaatgtggttaccattagtaaacgtcacacgatagcgcccattaagtacgccgggatttactgccgtcgtactcttttccgctgtgattttcttcagcggatagcgggcaaacagctccacctctacacattgcccactggcaacctgcgtcggcactggcaaaacccgattaagcaccgtcgcataacgggttagtaccgttttgctggtgccactgccagtaacccacagcggtgtaccatcggttaaccagccagcaaaaccaccctgacggatttcctgtttatcatcggcaaaccagctccaggttttcacccgtacccgactaccgagcatggatgcgacaccgattttcgcctcgtccagcaccacatccagtaagacttcctgagctttgttttgcgcgggtaacgtcgctaatgaatcaagcagcgatttaaccgttaccgaggtttctggcttcagcgtagtcagagacgctaaccacgcaggtgcctgacgctgttgccagtattgcccccacacatctgcgccaatatgcaaccgctgcggcgcaaaatagagcccacaggaacgtaccagcgcggtatcgcgcgttatgctctccccagcctgacaacaataaacctcttccggggagtttccgcgacactggtagggctgctccggttgatgggtatcctccagccaggcgtaaacatacagtttccacaaactccctaacggcgtggtgagcgagtcaggtaatgctgagactttggtcacgcctgatgacgacagctgatacagttgatcgtgctgcgcaccgcgcagcaccagttgtaacggcgtctcctccgcaagtgttggcagagtaaccaacgccaatagccagacgattctgcgccagttcacttatttcacctgcatcccggtccattcactccctgccgcaacactttgctgcgcaggtgcataggaacgcacataacgagcaggaggcagaacgaattgccctttttgcgagaagcgcagcaaatggcggaaagtgaccgttcccgtcagttctttcaccggcaccatataggccagttcgcccatttcatttcgcgctttttccagcaattgcccctgctgtttcgcggcgttgggtttattgaccgaaatgccccatgttgtgcgctcaacgtcggctcccggtggcagcggtacttccacctgaccgtagcgcagaactgcatcctgctcgctggtaagcgtgatttcatcgagatacagcgcatcgctgtcaatctcattgctggtcaccggttgcagaataaagctcatctcttcttcaccagggataagccgatacaactggcgttcaacggtcaccggaatgttactttgttgagccatttttgccggctcacgccagcggacctgcacattttgcggcgataattcgtcaccaaaagagagaatgtccggcacgccctgaccaacccaacgccagtcttcgcccctccagttaacttatgtttagcccatgcgcccgcaggcgcaggcaaaacaactggaggcattgtcgccatatatttcgccagccagttcatggccagcgcgcgctcaatagtggattgctcagcggtcaaaccacttaaaatagcggccgtctgggtagcgtcgccaccgctattaagcagcacaaccgtgtgcgccagcggctgattgctgtttgccgctttatcccacgcatattgctgaacctgtggcatcaccgtggacttcaactgcgcttttttcagcaacgtcatggttaagacgtttgccaccgcatctgccagtggagactccggtgtatcgaggatcaggctatcattgatatcgcgggtgtcttcctcagagaaatcttcagttttagttccgcgccgggcgatagcttcatccaaccctttcaacaacgttttgcacggcaaattcatctcctgcgcccatgccagcaccagcgcccgatgcaataacggcatgttatctgcctgctccgcgtagctgtcgagcatatgctgccagtattccggttgttgcgttacgccgatcgcctggctggcctgccagtcggcgtaccatgcccatgccgtaaggaaggcgtcaccattgccatcttcaccccaccaggtaaagcgcgctccgggccccgccagttgcatcagccgcagacggttatcctgaatcatctgacgaatgtcgttagcggcggcactttgatgatcggcaagcgaacgccaggcgagactgagcgggatcagacggctaccggtgttgattacgccaccccacggttcatcgactaacgcatcaagattgttgcggaaaatctcctgcggcgtttcactactttgtagccggatattgctcgcctgctcgggcaacatcagcgcgttatcgccaccaccgagcatgacatttttctgctgttcaacgggccagctgttatccacaaaagacagttttgtgctaatgctgtcctgcacttgcccattttgttgcagttctgcacttaacaagccagattgctgaatattctgcgtcagcgaaatataattcgcccctttgtgcagcgtcagcgtctggcgcatctcagcgcctgcaaatttagtcaccagcgccaccggttcgttatcctgctgactgaagataaacagtcctgccgccggtttgtcgcccacgcgatacaccgttggcatactccacttcatgtagagatttttttccgaacgcagataagcacgcccctgcccgaccagcccgtcgccgttcatcccacgcgcggtgatacgccagcgggttaacgaatcaggcatcaggaacgtgaaatacgctttgccttgtttatcggttgtgagtgacggcatccatgccgcggtatccacctcttcacgccgtggacgttcaagcatttttactcgccgctcgctgcggttagttgcgccaggcgcaaccggctcgctggagagcgcctggtcgtagctgataaacgacagactggagctggtacgcacattgttacgccccagcggatagaaaaatttgccgatattcggcgcgatttctggttgcagcgcgtagatcatttcatcgaccacgcctaccgttagctgcgcagaaacaggtttacctttcagcgacgaggttaattcgacattgaccagttcaccaggctggtaatgggttttgtccgttttcacccggatatccagctggggaacggcaactttgatcccggcgttctgaaaactgtactgaccgttacgggtatacagcaccgaaaaagtgatgttaggcgcaaaggaattgctcactggaacccgggcttcatactgggtatcgtttaaacgttgtagcgttagccagtttgccggatgcgaaagcagcgactgctgttccacgcgatcgcgttccagcgtcaataatgcttcatcaattggctccggaaaggtaatcagcatcttcgcggtttcgcctggctggtacagcgttttatccgccacgatatctaccgtaccagtatgcgccgtgctgcccttaccgctgacggcatgacttaacccagcgagaattaagccgtctttatcgcgtaatgtcagattgtagttgccaggtttagcgaaattgacggtaaaggatttgccgcctgacggtagctctccgctatggctcgtgcggtcttcgagacgcaaccattcatacgtaacaggaacctgttttgaagattccagcgcggcataacggaacacaaccgactcgccgctattactgtattgtgcggcagtacttaatgagtaatgcgccagaccgcgttcaatgaggatctctttggtggtggtgacgcgatacgccgcgccgtcactggcggagacggttaacaaatagcggctcggtttatcggcggcggggagatttaacgccacatgaccgctggcgtcggacaccgtttcgctgccttccagcgacacggggaaacgtccggcataacgcaaatcgttaccgaccattgataattgctgagcgcgcaaacttaactgcacgcgggcattttttaccggctcgccatccgggtagagcagttgcagtttgccgctgaccgcttcgccagttttgaactcttttttggcgagagctaaaccaatctcgaaatgtggcttgatgtagtttgccacgcgaaaactgctgctatagacctgattgcggtaagcaagacgtaactcataacctccggctacggcattttctggcaggcggaaacttccctgcccgccattgcgcgcatccagcgtgacattgacggtttgcaacagactgccgttggcgtccagcaccgaaagcttcgccggggcgctgacgatgggggatgaatgcaacggatcgtggaactcgcggccgatcactttaacatcgacacgatcgcctgcgcgatatagcgggcgatcggtaaaaatatacaagcgggtgttgtagatttcgctttcgtagaagaagttctcggagacaaaaacgccgccttcagcatccttacccagaatgtatgaacgttctggcgatatatgttgtaactgcaaggtaccgctgtcatcggtcacaccgcgggtcatcacgccaagaccgtcagtccacaagatctctgagccgggcttcgcttcaccctgttttttacccgcggtccacaccagaagctctttgcctgacactttgctaagcgccacggtatcggaaacaaacaccaccgtcgtcgcccgatacccaccaaccatcgcctcgacgaggtacagtcccggctcttgttggccgagaggaatataaatgttacccggctgcggcgagatgaaattgctggatgcgccttccagttttaccccttgctgcggctcgaacggtttagcctgccatagtggataacggaactgtttcaccaggggatattttttcagcggggaaaactggttgttctgtacataacgggaaggtttaataatggcattgccgagctgtaattcgggtaacgcctgagtcacattctgccgtgactgagaagagaaagtacgctgcatcacgcggcgagatttgccgtaccagttatcccacagccaggttagcgtattgttcagcccgtcgcccagatattgcggttgcaccacaatgcgatgcaggtttttctgctggcgcaaaaatgccatcgggtcaggaatacgatacaggcgaacgtccacgccgccgtactcttccatctgatagcgccgataatcacgccccggcgcttccagtcgcactttcgcctcttcactgctgctaaaactgctgtcagcaagcaaaaagaatgttcccccggcaggcggcgcatagttgctggaaggaagcgaatcatcagcattagcaagccctgttcccacaagagacagggacaagcacgctgctatcgcgccagaaaatttaaacgataaatgccaatgaaattgggattggaatcgttgggtatccatcgggtgtccttccatgtcataagttgttgcagactgactgcgcgcattccgttgtcagttttcgtggcgcttccggtgtggtagatgacgtaacgccccatccagaccattaagtgctgggcatcgccctgatcgaaaaaaatcatatcgccaggcagcgcctggtttatgtcctggccaataaactggctgttgtactgaatcaaattaatcgcggtcacataggggccggttttcccgttcccctgattccagttttgcgccagttgacgctgttcaggtgttagcgtcatctctggcggcaaatactggctagataaaccgttactttttagccatttactgtcgtgaactttcagcgtctcgttcgccgcaaatcgcaccaggcccgcacaatcctgctgataccagcgtggacttggcccctggcggagctgttcttgtgcaatgcgtacaaaccaggcgcgaaacagcccggattgttcgacattcagcatttcgctatgggcaacaacacaacacagccagcaaatcagcgccagcagcccgtgcctcatagcggctgccaggttatgggtagccactgccaggcggcaccgggttccatctgggccagcttcatgacataacgcggttgttgagataaagcgtccagcttcggcattaataaagtttgtgcggcgttataaaaaaccggttcgagattcttcggcagactggtcaacgtttcgttacgcagcagtttcgctattccttgtggattgatatagagcggaacgatgccatcagtgggtattacatccaccattgccgggcgggttttattcagtgtttgcagcgcgttattaaccagcgtgtcatcgagggagaaaagcagcgttttgttttgcatcgccagcgacacacggaaaaaataatccgacattaattgatcgggttgcgccgcctgcgctttcggatactggccgtatcgggaactcacttcgcgacgccagatttgcgcttcgccctgctgagtctggcttaccggcaaaacaccttctggcgctttgctttcgtgcgcaccaatattttgcgtaaacagtttccctggcaattgcgcctgttcggcagtgccatcaaactgaccgacaaacagcggggtttgcaattttgagtcttcataccagcacagccccgcggcaccgtctaacgccccattcagcttgtcgttttcctggctgatgtgcgaaagcatctcttcggcaataccgtgtgaatacggcaccgccacacagaagctggctccggcaggcatactgttccataccggcgtaaaatcgaaactggcatctacgctggcggattcatcatttaacgccacaaaactgtgccagccgtcgttacccatttcgaagcgtacgccagcaaaagaaggcattaaccgctggtagccaaaccccagccacctggcgctgactacgatgcgctggcgtactggcgttttttcggcagtacgctcttccaggccaaagcttgcttgccagcgttttttgccgctcaacaaatcacctgcgatcgccgtggcttcggtatcctgctgatcatctttaaacaacatatccgtgctggaaaacaccagcatcttgtcctgataagtcgcgaacatcagggcgttattgccgttatagcgcaactgataaacaggaacagtttcactatttatcttgatgctactgatttccgttttgcttaactggctgtcgctggtagcggcaaacaacaatggctccagcagtttgcttaaaccactgcgctggatcagcaccatataatgtgaaagatggccttgtttatcgtgccacagcgctgcctgcgcgggctgatctaagagtgacgaaaagagcttatctttcagcgtgagatcgtgttcatagacaatacgacgaatgctgccttcaatgcccagacgatcggcatgattctgataatagaaaacgaaatcttcgctcagaacatcgtggagaaacggaatggtgaggagatctttgggaagctggctcagagagtcgctgtcgagaaagaggtccggctcattgagatcgatttgcagattgttgtgcaccaccagcggcgacaacgttttttctggcccactgccagcatattgcaacgcccagacgccagcggaaagcagtgctattgcgccaaaacctacaagaccatagaaccgccagcctttcgcctttttttcaccactcattgccacattccttgtgtatagccagccattttttacgggcacagccaaactttaccgtgccctaatacgacaaaagcccagactttgcagcctggacttttcaattcaaacaagggagatagctcccttttggcatgaagaagtaaaattattcttcttctggctcgtcgtcaacgtccacttccggagcgatttcatcgtccccttccgcggcactgccgtcgatggtatccagatcttcctcgtcaaccggttcagcaacacgttgcagacccactacgttttcatcttccgcagtacggatgaggatcacgccctgggtgttacggcccacgatgctgatttccgaaacgcgagtacgtaccagcgtaccggcatcggtgatcatcatgatctggtcgcagtcatctacctgtaccgcgccaacaactaaaccgttacgttcggtaaccttgatggagataacccctttcgtcgcacgcgacttggttgggtattccgccactgcggtacgtttaccgtaaccgttttgcgttgcggtgaggattgcgccatcgccacgaggcacgatcagagagacgactttatcgccttcacctaagcgaataccgcgaacaccggtggtgttgcagcccatcgcacggacagaagactctttaaagcgcaccactttaccttcagcggagaacagcattacttcgtcttcgccgctggtcaggtcaacgccgatcagctcatcgccgtcaaccagtttgatcgccactttaccggcggtacgcagacggttgaactcggtgaggacagttttcttcacggtaccgttagcggtcgccatgaagactttcacgccttcttcaaactcggtcactggcaggatcgcagtgatacgttcgtcctgctccagcggcagcaggttgacgatcggacgaccgcgcgcgccacgagtggcttccggcaactgataaactttcatcgaatagacgcgaccacggctggagaagcacagaatatggtcgtgagtgttcgccaccagcagtcggtcgataaagtcttcttctttaatacgtgcggcagatttacctttcccgccacgacgctgcgcttcgtattcagaaagcggctgatacttaacgtagccctggtgagagagcgtcacgaccacatcttcctgggtgatcagatcttccaggttgatgtctgcgctgttggcggtgatttcagtacgacgtttgtcaccgaactgttcacgaaccagctccagctcttcacggatcacttccatcagacgatcggcgctaccaagaatacgcaacagttccgcgatctgatccagcagctctttgtattcgtcgagcagtttttcgtgctcaagaccggtcagtttctgcaaacgcagatccagaatcgcctgagcttgctgttcggtcaggtagtacagaccatcacgcacgccgaactctggctccagccattccggacgcgcagcatcgtcgccagcacgttcgagcatcgcggcaacgttgcccagctgccacggattagcaaccagcgcagttttcgcttctgcaggcgtcggcgcatgacggatcagttcgatgatcgggtcgatgttcgccagcgccacggctaatgcttcaaggatatgagcacgatcgcgagctttacgcagttcgaaaatagtacgacgggtcaccacttcacggcggtgacgaacaaacgccgcgatgatgtctttcaggttcatgatcttcggctgaccatggtgcaatgccaccatgttgataccgaaagaaacctgcaactgggtctgggagtagaggttgttgagcacaacttcaccgaccgcatcgcgtttcacttcaatcacgatgcgcataccgtctttgtcagactcgtcacgcagcgcgctgatgccttccacgcgtttttcttttaccagttccgcaatcttctcgatcaggcgcgctttgtttacctgatacggaatttcgtggacgataatggtttcacgaccggttttggcgtcaacttccacttctgcgcgagcgcggatatacaccttgccgcgaccggtacggtaagcttcttcaataccgcgacgaccgttaatgattgccgccgtcgggaagtccggccccgggatgtgttccatcagcccttcaatgctgatgtcttcatcatcaatatacgccagacaaccgttgatgacttccgtcaggttgtgcggcgggatgttggttgccatacctacggcgataccggaagaaccgttcaccagcaggttaggaattttggttggcatgacgtccggaattttttccgtgccgtcatagttatcaacgaaatcgaccgtctctttttcgagatcggccatcagttcatgggcaattttcgccagacggatttccgtataacgcattgccgccgcagagtcgccgtcgatagaaccgaagttaccctgaccgtctaccagcatataacgcagcgagaatggctgcgccatgcggacgatcgtgtcatagaccgccgagtcaccatggggatggtatttaccgattacgtcaccaacgacacgggcagattttttataggctttgttccagtcattgcctagtacgttcatggcgtaaagtacgcgacggtgtaccggcttcaggccatctcggacatctggcagcgcacggccaacaatgaccgacatcgcataatccagataggagctcttcagctcttcctcaatgttgaccggtgtaatttctctcgcaaggtcgctcatctaaccgctatccctctactgtatcccggattcaaaggtcgcaaattataacacagccgcgcagtttgaggtaaacctatacgctttattcacatccaatgcctgatatactcgtttgtcttgccaattacggagtagaagtgccaatgaatgccgaaaaatcgccggtaaaccataacgtagaccacgaagagatcgctaaatttgaagccgtcgcctcccgctggtgggatctggaaggtgagttcaaaccgctgcaccgcattaacccgctgcgtctgggctatattgccgagcgtgctggcggtttatttggcaaaaaggtgctcgatgtcggttgtggcggcggcattctggccgagagtatggcgcgcgaaggcgcgacggtgaccggtctggatatgggctttgagccattgcaggtggcaaaactgcacgcactggaaagcggcattcaggtggattacgtgcaggaaaccgtggaagagcacgcggcaaaacatgccgggcagtatgatgtggtgacctgcatggagatgctggagcacgtccccgatccgcagtcagtggtcagagcctgtgcgcaactggtgaaaccaggcggcgatgtctttttctcgacacttaaccgcaacggcaagtcatggctgatggcggtggttggtgcggaatatattttgcgcatggtgcccaaaggcacgcatgatgtgaagaagtttattaaaccggcagaattgctgggctgggtggatcagaccagtttaaaagagcggcatatcactgggctgcattacaacccgatcactaatacttttaaactcggccccggcgtggatgtgaactatatgctgcacacgcagaataagtgaggttgatgtttggccgcgccaatgcctgatgcgacgcttgccgcgtcttatcaggcctacaaatgctccccgtaggccggataaggcgtttacgccgcatccggcaaccgtgccgactagacagtgattaccatttcaccgtcatcgacaaaaaccctgccgtctgggcaaaatcatcactccctttctgccacgccacgctgccgcgcagggacactcgctgactgatattgcccgtgactcccacttttatttcaccccgttgcttcaccgcatcgtcactgatagtgctgccatcctcttcaatttccgtcgaatggggatcgtgataataattcagatctaatgttggtatgacatgaacagcggtacgccattcgctgtgtaaacccagccgcgtctgaatatcatcaccctgcgattgtgacacgcgcgcacggttagcggcggtaaaatcatcctgctgcacgccctgataaatcacctgcgcctgcggttcaatcaccacaccacgccccggtaaccactgataccccgcctccagcgaggcgataatccccgacgagtggtaatgatctgtgccatcttcttgttcggaaacatcattgctaaaccacgcgtattgcagccagctatccagccaggccccttgcttctgattaccgtgctgaaaccagcttgatgtcagcccaacggcataaccgtggttctggttatcggcgcgagttccggtcatattcgagcggctgtcgccctggttatcgctgtagccaccaacaatcccaagcatccactcgccatccgtgccccagcgcccgctaaacagatcgccgctaagttgcaccgtagaagtgtcttcatgttgagccagttgccccgctgctgtgtaatgataatctccgccgataacacgtaaattcagcgtctgaccatcgccacctgcgtgatcgcgtcgctccatcataaacgcctgatttgccgcccgcaggttattgagataaccgccaactttggcattcaacaccggctggtaagcaggcgtaggttccgggtcgggtgttggatcaggatccggcgtgggatcgggagtcgggtctggatcaggtggcgatggcggcgttacttcttgcgatcgcagataccagtcgttgttatcttccaccagcgtgtagtcatacgctcccatattgacgtagccgctgcctgccagactgaactgcgcattgttttgaaactgcgtgggatcagctgcgaaatcaaccactttaatgcctgtcgatgtcggctcaccaatccctgtaatggagttaaccaccacagttgtgttgccagcagtattaccgttcatcaccaattgatcgcttaccgagtcatcgccgtttaattcgctatcgagcagtagcgtaccgccgccggtataatcaccgtttaccgtcagcgtatcgccagcgacgccattttgcaggctaaccgcaccggacgtattggtcagattgccattaaccgtcacgttggaaagataagtcaggctgtcagtttcaaggttggtattaagctcacctgtcaacgtcacaccatcggtggcattcaccagcgtcccatcgccgttaaatagtgaggcattaagggcgacggaagtatcctgcccggtcaggcgcaaaaccgtaccatcgctgatgtcgatagtgccgctggaaatagcatcaattgactgaatatcctgatccgcgccagtaacgaacgttgccccatcaccaacccacagtgacgaagcataaggaaggatatcagcaacatcacctttcagggtgccttcttcgacacgtaccgccgactgcgttgtaccgctggcggtcagctccagtgtaccagcccccgttttagtcaatgtgctaccctcatcctgatgctgcccgctgctgtcagccatcagtgcgccccactgcgtgtctacccccgcatcaactgccacttcaccgtcggcgcgcatttcaatatcacgtccgtggcctgccgcatctgaacgcgtgtcaacgtcggaggtaatctccatcacgctttcttgttgcttatcggtaaagataacctggcggttatagtgggtatctccaagctgcgagttgtcgctcaccatcagcgtaccggaggcgatttgtgttgtgcccaaataactattattgtttgccagacttacctgcccgtcgctcgcatcgaccaccacgtagacgccatctttcccgtcgccgccgatatgcaaattgtcgccacctgcaagatctaccacatcctgactgccgataaccgttccgctgctgccactgacttcaaggccatcgttgtatgatgtgccgctctgccaggtggagaaatcagagagatcgagcacaccgccgtttaacacgatcgactgcggatcgtcctggagagcggtaagatctgccgcgtcgccttccagcgaaagcaccgcaccatcatcaacgactatatcgccggttagcgccatcgactgcgcccctgccagcacgtagctgccgttttgcgcaatggtgagctgaccagcaccttcgatgatgccagcaaaactgccctgattaacagtaacgttgccaccagcatcgatatttaaagtgccattctgaaagcccgtcaatgcgtgcacaaaagtttgttgggtcgagccaacgtttagctcagcctgattctgatactgatcaatactccctatcgtcagaccgtagcagtcttgcggatcgtcctggcaatgcgtatcgccgacattcatcagggagttgctgcggcccagggtaacttcaccgttttcaatctgcatctcaccagtaaagtcattgttatctgcattaagtaccagatcgccggaacctgttttggtgattaacccggtaccagcaatagagtcaacagctccgtcattctctgtattgccaataaccagcgtttttccgtcggcaatatcaaaggtaacttcacttaagccgagatacataaagccacccgccgcagaggaaggaccatctccatagcctgctgcgctattgttctcatcgactaacacgcctccgttctggctgtagctgtcatcaacagaaatatcaataagatagggagccgtcacgctattggtatatatcgccccgccataaccttcggcagtgttatttgtaaaggcagtgttatttactatcgtataacctgaaggatgcttgctgtcgctattattatcggtaacatcgattgccccgccatcgccatcactgtaacttgttgatgtatatgcctggttgttatcaaaaataacatcacttaaataaacgtcattattaatggtataaattgcgccacctttgccatcattagcgatgttattgcgaaacatggcgttagtgacacgtaaatcgacggcaccagtatcgttagtaccagaagaatagattgcgccaccatagccgcctgcgacgttaccggaaaaaataacatcagtaagattcagcgttgagttttctttagcaaatatggccccgccgttattatattctcctgtaacggtgttattggcaaacagagtcattccagtttcattttctggtaatagtgaaaattccgctccttgttgcaaaaatacggccccaccgctggcgttattggtcatatccgaaaaaaccagccattgcccatcagcgatactccagtcctgcgtaatgcctgaaaggctttgcctgctggcctgacaactcgctttgacatcatatccctggcatgaatcagtgaccgccgcgacaccgttagcagagaaaagagatgcaatcattgacgggagtaaagataaatactccttgcgtagaaagataatccgcatattaatctaaccatcattttctataagacggcgtatttaatcgcattatacgatatggaatatctttcttttgtaaattgttcaacccggtgcaatggctattttgttattatttgatgaataatatcagtgcgtcataattcaagttaataaccttcagggatatcagttatatttaaactaaattaaagtcatgaataattttcttataatataaggtaaattaacaaaatggcttagcatttaacaataaccgaatagaaaacaaccatttcgccatcaacaatctcttacattcgcttatatattgaccacaactgatacatcagattatgtgatgactcgtgcttagatcaatttttgcaatcattagcaaaaagattaataaaccatctatatcaatttatctaacctattatgccgttcaagaaatcgccgaacagttatttttaacaaatttttctcttcccattgactttcccggacaccttgtctgacctaaggtgcgcgaaagccactttttccttcctgagttatccacaaagttatgcacttgcaagagggtcattttcacactatcttgcagtgaatcccaaacataccccctatatatagtgttctaagcagcttcccgtactacaggtagtctgcatgaaactattgcggaaagaattccaaaaacaggtacgacatacatgaatcagaatctgctggtgacaaagcgcgacggtagcacagagcgcatcaatctcgacaaaatccatcgcgttctggattgggcggcagaaggactgcataacgtttcgatttcccaggtcgagctgcgctcccacattcagttttatgacggtatcaagacctctgacatccacgaaaccattatcaaggctgccgcagacctgatctcccgtgatgcgccggattatcagtatctcgccgcgcgcctggcgatcttccacctgcgtaaaaaagcctacggccagtttgagccgcctgcgctgtacgaccacgtggtgaaaatggtcgagatgggcaaatacgataatcatctgctggaagactacacggaagaagagttcaagcagatggacacctttatcgatcacgaccgtgatatgaccttctcttatgctgccgttaagcagctggaaggcaaatatctggtacagaaccgcgtgaccggcgaaatctatgagagcgcccagttcctttatattctagttgccgcgtgcttgttctcgaactacccgcgtgaaacgcgcctgcaatatgtgaagcgtttttacgacgcggtttccacatttaaaatttcgctgccgacgccaatcatgtccggcgtgcgtaccccgactcgtcagttcagctcctgcgtactgatcgagtgcggtgacagcctggattccatcaacgccacctccagcgcgattgttaaatacgtttcccagcgtgccgggatcggcatcaacgccgggcgtattcgtgcgctgggtagcccgattcgcggtggtgaagcgttccataccggctgcattccgttctacaaacatttccagacagcggtgaaatcctgctctcagggcggtgtgcgcggcggtgcggcaacgctgttctacccgatgtggcatctggaagtggaaagcctgctggtgttgaaaaacaaccgtggtgtggaaggcaaccgcgtgcgtcatatggactacggggtacaaatcaacaaactgatgtatacccgtctgctgaaaggtgaagatatcaccctgttcagcccgtccgacgtaccggggctgtacgacgcgttcttcgccgatcaggaagagtttgaacgtctgtataccaaatatgagaaagacgacagcatccgcaagcagcgtgtgaaagccgttgagctgttctcgctgatgatgcaggaacgtgcgtctaccggtcgtatctatattcagaacgttgaccactgcaatacccatagcccgtttgatccggccatcgcgccagtgcgtcagtctaacctgtgcctggagatagccctgccgaccaaaccgctgaacgacgtcaacgacgagaacggtgaaatcgcgctgtgtacgctgtctgctttcaacctgggcgcaattaataacctggatgaactggaagagctggcaattctggcggttcgtgcacttgacgcgctgctggattatcaggattacccgatcccggccgccaaacgtggagcgatgggtcgtcgtacgctgggtattggtgtgatcaacttcgcttactacctggcgaagcacggtaaacgctactccgacggcagcgccaacaacctgacgcataaaaccttcgaagccattcagtattacctgctgaaagcctctaatgagctggcgaaagagcaaggcgcgtgcccgtggtttaacgaaaccacttacgcgaaagggatcctgccgatcgatacctataagaaagatctggataccatcgctaatgagccgctgcattacgactgggaagctctgcgtgagtcaatcaaaacgcacggtctgcgtaactccacgctttctgctctgatgccgtccgagacttcttcgcagatctctaacgccactaacggtattgaaccgccgcgcggttacgtcagcatcaaagcgtcgaaagacggtattttgcgccaggtggtgccggactacgagcacctgcacgacgcctatgagctgctgtgggaaatgccgggtaacgatggttatctgcaactggtgggtatcatgcagaaatttatcgatcagtcgatctctgccaacaccaactacgatccgtcacgcttcccgtcaggaaaagtgccgatgcagcagttgctgaaagacctgctcaccgcctacaaattcggggtcaaaacactgtattatcagaacacccgtgacggcgctgaagacgcacaagacgatctggtgccgtcaatccaggacgatggctgcgaaagcggcgcatgtaagatctgatattgagatgccggatgcggcgtaaacgccttatccggcctacggctcggtttgtaggcctgataagacgcgccagcgtcgcatcaggctccgggtgccggatgcagcgtgaacgccttatccggcctacggctcggatttgtaggcctgataagacgcgccagcgtcgcatcaggcacaggatgcggcgtaaaatgccttatccggcattaaactcccaacaggacacactcatggcatataccaccttttcacagacgaaaaatgatcagctcaaagaaccgatgttctttggtcagccggtcaacgtggctcgctacgatcagcaaaaatatgacatcttcgaaaagctgatcgaaaagcagctctctttcttctggcgtccggaagaagttgacgtctcccgcgaccgtatagattaccaggcgctgccggagcacgaaaaacacatctttatcagcaacctgaaatatcagacgctgctggattccattcagggtcgtagcccgaacgtggcgctattgccgcttatttctattccggaactggaaacctgggtcgaaacctgggcgttctcagaaacgattcattcccgttcctatactcatatcattcgtaatatcgttaacgatccgtctgttgtgtttgacgatatcgtcaccaacgagcagatccagaaacgtgcggaagggatctccagctattacgatgagctgatcgaaatgaccagctactggcatctgctgggcgaaggtacccacaccgttaacggtaaaactgtgaccgttagcctgcgcgagctgaagaaaaaactgtatctctgcctgatgagcgttaacgcgctggaagcgattcgtttctacgtcagctttgcttgttccttcgcatttgcagaacgcgaattgatggaaggcaacgccaaaattattcgcctgattgcccgcgacgaagccctgcacctgaccggcacccagcatatgctgaatctgctgcgcagcggcgcggacgatcctgagatggcggaaattgccgaagagtgtaagcaggagtgctatgacctgtttgttcaggcagctcaacaggagaaagactgggcggattatctgttccgcgacggttcgatgattggtctgaataaagacattctctgccagtacgttgaatacatcaccaatatccgtatgcaggcagtcggtttggatctgccgttccagacgcgctccaacccgatcccgtggatcaacacttggctggtgtctgataacgtgcaggttgctccgcaggaagtggaagtcagttcttatctggtcgggcagattgactcggaagtggacaccgacgatttgagtaacttccagctctgatggcccgcgttaccctgcgcatcactggcacacaactgctgtgccaggatgaacacccttcccttctggcggcgctggaatcccacaatgtggcggttgagtaccagtgtcgcgaaggttactgcggctcctgtcgcacacgcctggttgcaggtcaagttgactggattgccgaaccgttagcctttattcagccgggggaaattttgccctgttgttgccgggcaaaaggcgatattgaaatcgagatgtgaattggttgtagtgccagatacaacgcttatgcgtcttatctggcctacaacgattacatggcgtagtaatacgctttcacctgctcccagtccgctttggggattggctccagatatttttccagctggcggaagtcatgattaatcgctttatcgcgacgcaagcggcgacgacttttctccaggtcaagaaaaccagcttctgcattaccttctgttttcacatagatatggcgaacataacaacagccatgctgacgattaatgctatgcattttcttaaacgccagcgccactgctttcaacatggcttgccgtacttcgtcagaataaggcgatactgcatgctgggcataccagtcagcaatgctgatgaaccccgccatatcttcagtcaccagcaacgctcgccattcaccctcaattttcaccgcttcaccaaaaacgatcttcggcacgatgacaccggcccgttccagttctttaattaccgcaacctcaaggacaatcgttggtcggccgaacggataacgtacggaatgaaacagatgatgcgtcatgcgctttacatacagctttttgccgttgcgctcgacgcattgcaccccgctcataccattacggcgatagttaggctcttcaacccagtcgccctctgttgcccaccagtgattaaattcgtcgtactttgctgaaactgccataccctatcgcctgtcatttttattaacgacaatgactataggtggttacctgaggaaaatcttaatgaaacgtgtcgtattaatgaatttcttttgccactactagcttgacaccgcttttacccttcatttgcagcgcatagattccaccagccactaccactaatagtgcgcccagcagataaaatgtgaatttaatcaggcggatacagcgatgaattttattcgacagggattaggcatcgccttacaaccagagttaacgctgaaaagcattgcaggtgaattgtgttccgttcctctcgaaccaactttctatcgacagatttcgttgctggctaaagaaaagccggtagaaggcagtccactgtttttactacaaatgtgcatggaacaattagtggcgattggaaaaatttgatatgagacaggatggcgcatgaacgccatcctgcagtaacattactctttattaagaaattttactgccttatcagggaaatcagtaaacagcccatttacacccgctttgttatacagagcatcatataactgattcacatcaggagtgtattcaggcagtttatctgaccgcacggtataaggatgcactaccagtttattctgctgagcatcttgcaccatgccagtgagtttgatattacccggctgcgatgtctcctcaatcaacatatggtaatccggaccaataccatctgcatattccgccacctgtttcatggcacccggcttaaacatccagtcgtagttgtaattaacccagcttccatccggctgtttctgctgcgtttcattccagtcggtataggcaatcagctgtaccagattgagctccatgcccattttgggttccagctcattcttaatacgcttcagctcatcagcatcaaaacattgcaaataaactttatcgtctttaccggtgtaaccatatttcttcagcacttccagcgtttttgccgcaatatccttcccttcctgatgatggaaccacggcgctttgatttctggataaataccgatatttttcccggtagagtgatttaacccctgaacaaattcaatctcttcttcaaaggtgtgcacccggaagtcggacttacccattgggaaacgccccggataagtctgcacttttttaccgttttcaatatcgaaaccttcggtaaatttcaacgacttaatttcatccagcgtgaaatctatcgcgtagtaacgaccgtctttgcgcgcccgatccgggaaacgatcggcaacatcagtaacacgatcgaggtaatggtcatgcagaacaaccagattgtcgtctttggtcatcaccaaatcctgttccagataatccgctccctgcgcatacgccatcgcttttgctggcagcgtatgctccggcaaatatccactggcaccgcgatgggcgatgactattttttcgttgctgtccgccgccattgcactgcttcccatgactatagtgctcatcatgatcgccatgctaaggtttttcagcgtcaatttcatgccattagcctccgttgcgttcttgcagtaattgttcatggcgacgtttttcgccaatcatcacaacaatcaacaagataaccgccagaatgctgccgccaatcattaccataaagccgccatcccagccgaagaagtccacggtgtagccaacaatcgcgctcgccgccaccgaaccgcccaggtaaccaaacagcccggtaaagcccgctgccgtacctgccgcttttttcggtgccagttccagcgcatgcagaccgatcagcatcacaggaccgtagatcaggaagccgataacaatcatacaaatcatatcgacggttgggttacctgccgggttcatccagtaaacgatagtcgcgatggtcaccagtgtcataaagaaaacgccggttgccccacggttgccacggaagactttatccgacatccagccgcacagcagagtgcccggaatacctgcatattcataaaggaagtaggcccaggaggatttatctagcgcgaaatgcttaacctctttcagataagtcggtgaccagtcgaggatgccgtaacgcagcagataaacgaacacgttggcgatggcgatataccacagcagtttgttcggcagtacgtactgcatgaagatttgcttcgccgtcagctcctgttccgctttttcgttatagtcgtccggataatcatttttgtactcttcgatcggcggcaagccacaggattgcggggtatcgcgcatcatcgcaaaggcgaataatgccaccagaatggcgcagaaagcaggcatatagagcgccgcatgccagtcattgaaccaggccatccccagcaggaacagcagcggcggaataccaccaccgacgttgtgcgcacagttccacactgacacaatgccgccacgttctttctgcgaccaccagtgcaccatagtacgaccacacggcggccaccccatcccctggaaccaaccgcagaggaacaacagtacaaacatcaccgcaatgctcgacgtcgcccatggcacaaagcccataaacaacatcactgccgccgccagaaccaaacctgcgggcaggaaaacgcgcggattcgagcgatccgataccgaacccatgatgaatttcgaaaatccataagcaatcgagatccccgaaagggcaaaacctaaatcaccgcgtgagaatccctgctcaaccagataaggcatagcaagcgcaaagttcttacgaaccaaatagtaagccgcatagccaaagaatatccccaggaaaatttgccagcgcaatcgacgataagtcggatcgatctccgcggcaggtaagcgcgctttgtgtggcgctggtttaaaaatactcaacattgatagcctccgtggcccgtggtcttatttatgattaacagcctgattcagtgagagaacctgccgtttcttgagttgccgcgatgttaagaaaacattcataaattaaatgtgaattgccgcacacattattaaataagatttacaaaatgttcaaaatgacgcatgaaatcacgtttcactttcgaattatgagcgaatatgcgcgaaatcaaacaattcatgtttttactatggctaaatggtaaaaaacgaacttcagagggataacaatgaaaactcgcgactcgcaatcaagtgacgtgattatcattggcggcggcgcaacgggagccgggattgcccgcgactgtgccctgcgcgggctgcgcgtgattttggttgagcgccacgacatcgcaaccggtgccaccgggcgtaaccacggcctgctgcacagcggtgcgcgctatgcggtaaccgatgcggaatcggcccgcgaatgcattagtgaaaaccagatcctgaaacgcattgcacgtcactgcgttgaaccaaccaacggcctgtttatcaccctgccggaagataacctctccttccaggccacttttattcgcgcctgcgaagaagcagggatcagcgcagaagctatagacccgcagcaagcgcgcattatcgaacctgccgttaacccggcactgattggcgcggtgaaagttccggatggcaccgttgatccatttcgtctgaccgcagcaaacatgctggatgccaaagaacacggtgccgttatccttaccgctcatgaagtcacggggctgattcgtgaaggcgcgacggtgtgcggtgttcgtgtacgtaaccatctcaccggcgaaactcaggcccttcatgcacctgtcgtggttaatgccgctgggatctgggggcaacacattgccgaatatgccgatctgcgcattcgcatgttcccggcgaaaggatcgctgctgatcatggatcaccgcattaaccagcatgtgatcaaccgctgccgtaaaccttccgacgccgatattctggtgcctggcgataccatttcgctgattggtaccacctctttacgtattgattacaacgagattgacgataatcgagtgacggcagaagaggttgatattctgctgcgtgaaggggaaaaactggcccccgtgatggcgaaaacgcgcattttgcgggcctattctggcgtgcgcccgctggttgccagcgatgacgacccgagcggacgtaacgtcagccgtggcatcgtgctgctcgaccatgctgaacgcgatggtctggacggatttatcaccatcaccggtggcaaactgatgacctatcggctgatggctgaatgggctaccgacgcggtatgccgcaaactgggcaacacgcgcccctgtacgactgccgatctggcactgcctggttcacaagaacccgctgaagttaccttgcgtaaagtcatctccctgcctgccccgctgcgcggttctgcggtttatcgtcatggcgatcgcacgcctgcctggctgagcgaaggccgtctgcaccgtagcctggtatgtgagtgcgaagcggtaactgcgagtgaagtgcagtacgcggtagaaaatttaaacgttaatagcctgctggatttacgccgtcgtacccgtgtggggatgggcacctgccagggcgaactctgcgcctgccgcgctgccggactgctgcaacgttttaacgtcacgacgtccgcgcaatctatcgagcaactttccaccttccttaacgaacgctggaaaggcgtgcaacccatcgcctggggagatgcactgcgcgaaagcgaatttacccgctgggtttatcagggattgtgtggtctggagaaggagcagaaagatgcgctttgatactgtcattatgggcggcggcctcgccggattactctgtggcctgcaactgcaaaaacacggcctgcgctgtgccattgtcactcgtggtcaaagcgcactgcatttctcatccggatcgctggatttgctgagccatctgccagatggtcaaccggtgacagacattcacagtggactggaatctttgcgtcagcaggcaccagcccatccttactcccttctcgagccacaacgcgtgctcgatctcgcttgccaggcgcaggcattaatcgctgaaagcggtgcgcaattgcagggcagcgtagaacttgctcaccagcgggttacgccgctcggcactctgcgctctacctggctaagttcgccagaagtccccgtctggccgctgcccgcgaagaaaatatgtgtagtgggaattagcggcctgatggattttcaggcgcaccttgcggcagcttcgttgcgtgaactcggccttgccgttgaaaccgcagaaatagagctgccggaactggatgtgctgcgcaataacgccaccgaatttcgcgcggtgaatatcgcccgtttccttgataatgaagaaaactggccgctgttacttgatgcgcttattcctgtcgccaatacctgcgaaatgatcctgatgcccgcctgcttcggtctggccgatgacaaactgtggcgttggttgaatgaaaaactaccttgttcactgatgcttttgccaacgctgccgccttccgtgctgggcattcgtctgcaaaaccagttacagcgccagtttgtgcgccagggtggcgtgtggatgccgggcgatgaagtgaaaaaagtgacctgtaaaaatggcgtagtgaacgaaatctggacccgcaatcacgccgatattccgctacgtccacgtttcgcggttctcgccagcggcagtttctttagtggcggactggtagcggaacgtaacggcattcgagagccgattctcggccttgatgtgctacaaaccgccacgcggggtgaatggtataagggagatttttttgcgccgcaaccgtggcagcagttcggtgtaaccactgatgagacgctacgcccgtcacaggcagggcaaaccattgaaaacctgtttgccatcggttcggtgctgggcggatttgatcccatcgcccagggatgcggcggcggtgtttgtgccgtcagtgctttacatgccgctcaacagattgcccaacgcgcaggaggccaacaatgaatgacaccagcttcgaaaactgcattaagtgcaccgtctgcaccaccgcctgcccggtgagccgggtgaatcccggttatccagggccaaaacaagccgggccggatggcgagcgtctgcgtttgaaagatggcgcactgtatgacgaggcgctgaaatattgcatcaactgcaaacgttgtgaagtcgcctgcccgtccgatgtgaagattggcgatattatccagcgcgcgcgggcgaaatatgacaccacgcgcccgtcgctgcgtaattttgtgttgagtcataccgacctgatgggtagcgtttccacgccgttcgcaccaatcgtcaacaccgctacctcgctgaaaccggtgcggcagctgcttgatgcggcgttaaaaatcgatcatcgccgcacgctaccgaaatactccttcggcacgttccgtcgctggtatcgcagcgtggcggctcagcaagcacaatataaagaccaggtcgctttctttcacggctgcttcgttaactacaaccatccgcagttaggtaaagatttaattaaagtgctcaacgcaatgggtaccggtgtacaactgctcagcaaagaaaaatgctgcggcgtaccgctaatcgccaacggctttaccgataaagcacgcaaacaggcaattacgaatgtagagtcgatccgcgaagctgtgggagtaaaaggcattccggtgattgccacctcctcaacctgtacatttgccctgcgcgacgaatacccggaagtgctgaatgtcgacaacaaaggcttgcgcgatcatatcgaactggcaacccgctggctgtggcgcaagctggacgaaggcaaaacgttaccgctgaaaccgctgccgctgaaagtggtttatcacactccgtgccatatggaaaaaatgggctggacgctctacaccctggagctgttgcgtaacatcccggggcttgagttaacggtgctggattcccagtgctgcggtattgcgggtacttacggtttcaaaaaagagaactaccccacctcacaagccatcggcgcaccactgttccgccagatagaagaaagcggcgcagatctggtggtcaccgactgcgaaacctgtaaatggcagattgagatgtccacaagtcttcgctgcgaacatccgattacgctactggcccaggcgctggcttaaactcctttctgatgcccggtaagcatgtggttaccgggcatttttgcgtacacgattccgtgcccaatgtatgcgttgcaacgcagtgaaaattcctctgaaaacgtctcgcaaaggctgaaactggcagatgtcaaaggcctgggataaccgtaatgtcgcgtcatcataaatatcaggtgacggacaaccatgaccgaatcaacaacctcctccccgcatgatgcggtatttaaaacctttatgttcacacccgaaaccgcacgggattttctcgaaatacatttaccagaaccactgcgcaagctttgcaacctgcaaaccttacgcctggaacccactagttttattgaaaaaagtttacgcgcttactactcggatgttttgtggtccgtggaaaccagcgacggtgacggctatatctactgcgtgattgaacatcaaagctctgcagaaaagaatatggcttttcggctaatgcgctatgccactgccgccatgcagcgtcacctggacaaaggctatgacagagtcccgctggtggtgccgttgctgttttatcatggcgaaacctcgccttacccgtactcactcaactggctggatgagtttgacgatccgcaacttgcccggcagttgtacaccgaagcttttccgttggtggatatcaccatcgtacctgacgatgagatcatgcaacatcggcgtatagctctgctggaactgattcaaaagcatattcgcgaccgcgatttaatcggcatggtcgacaggatcaccacgcttttggttagaggcttcactaatgacagccagctacaaacactgtttaattatctgctgcaatgcggcgatacctcccgtttcacccgttttattgaggagattgccgaacgttcaccactacaaaaggagagattaatgactattgctgaacggctacggcaggaagggcatcaaattggctggcaggaaggtatgcatgaacaagccattaaaattgctttgcgcatgctggagcagggctttgaacgtgagattgtgctggcgacaacccaactcactgatgctgatattccgaactgtcattaaaaggagagattaatgactattgctgaacggctgcggcaggaaggacatcaaattggctggcaggaaggtaaattagaaggtttgcatgaacaagccattaaaattgctttgcgcatgctggaacagggctttgatcgtgaccaggtgctcgcggccacccagctaagcgaagccgatctggcagcgaataaccactaattaacacaggcccacagccgatccccatgggcctttgatatcaataactaccttttatgcgtggcccatttttgcctgatttaaacatcgccagtcgttgatccagggcatcgctgtagagcatcgtgtcaacgccaacagcgacaaagttcgctccccacgccaggcattgctgcgccatatcaggagccacagccagaaaaccagccgctttacccgcagcacggatccgccgaatactggtttcaataattcgctgcacttccgggtgcccggcgttatccgggtagcccaacgacgcagaaagatccgcaggtccaataaacacgccatcaatcccttcgacgtcgaggatttcgtccaggttatccagtgccgttttactttccacctgcaccaacagacaaagcgaatcgttaacttgcgccatgtaattctcaatgcgtccccagcgcgcagcccgtgccacactggccccgacaccacgctcaccgtagggaggatagcgcgtggcagacaccacctgacgtgcctgttcggcagtatcgaccatcgggatcagtagagtttgcgcgccaatatccaggacttgtttaatcagcggtttactgccttccaccggacggatcacgggttggctggcatagggcgctaccgcctgtagctgatgataaagatcctgaatggtgtttggcgcgtgctccccgtcaatcagcaaccagtcataaccagaagtggcggcaatttctgccatataggcagtcgttgagcttaaccacagaccaatttgcacttcgcccttgcgtaaacgttctttaaagggattgcttaataatgcgttcatcgtgttccttaacctatttaatgatgtgccacgtcggtctgcgcaacagtgcgatttacacgcagagtgaaaataatcagcgaaccgatgaccgccaccgctgccagcgtcagtaatcccgccgcatcgctggcaaataacgtttctgctttcacgcgcaggatcggggcaataaacccgcccactgcaccaaacaggtttacaaaaccaattcccgcagccagcgccgtaccggaaagcagttgtgtcggcatcgtccagaacactggctgcacggcaataaacccgatagctgcaacacacagcgctacgatcgccattactggagaaagcagcccggacagaccaataccaatgcccgccgccagtaatgtcagcgctgcgacattacgccgttcgccggttttatcggaatagcgcggaataagccaggtcccaaacaaggccgcaacccacggaatggcggtgaccaccgacgctgtaaagcccacttttgttcccagcaatgccgcaacctgggtcggcaggaagaaaattaatccgtaaaccgccacctgaatggtcaggtagataatcgctagttgccagactcggccattacgcagcgcatcgctcagccgagaagtcactttctgttgttcttcacttgccagttgattgataagcaacgttttttcttgtttactcagaaaacgtgcctgctccggtgtgtcatcaagccaaaagaatgtgaataccccagcaccgactgccaacaatccttcaatcacaaacatccagaaccagccgggatgccccataaatccatgcatctccaacagcgcgccggaaagcggtgatcccagtgttaacgccagcggtgcgcccatatagaacagccccataatgctggcgcgattacgctgcggaaaccattgcgaggtgagataaatcataccagggaaaaatccggcctccgcagcaccaagcagagtgcgaactatcagaaatttcgcttcagtatcggcccatgccatggctgccgaaagaaatccccacagcagtgttgtcgtaccaatccaggttctggcccccagtttgcgcatcaaaagattcgccggaacacccagaaacgcatataccacaaagaaaatgcctgctcccagcgcataagcttcattactcaacccggtatcaatctggtaggtctgtttggcaaaaccgatattcgaacggtcgagaaacgccagcacatacagcgccaacataaacggaattaaacgcacacggtttttcttcaccacggcgtcaagcaaagcggtgctcataaaaagctccttagaatatgtgggcgttaccgttgtcacagcaacgcccggagtgattagtggctgtaggggcgtttcaaattgcagtcacgattgagttcgacgccaaaaccgggtttatcaagcactgatttatgaatacgaccattcaccggaaccggctcattgagcagaatcgggtcaaactgcggacgcatcgttgaacaatccgggctggtcatcaggaattcgctgaatggcgtattggtgaaggtgatcaccgcatggtgagagtaaacagacgaaccgtgcggcaccaccagttgccccctggatttggcgattgcggcaatttccaccagcgtggttaaaccaccgcaccagccaacatccggctgcataatgtcgataccggtttctgaaagcgtacgaaaagattgcagtgtgccgtggtgctcaccgctggtgaccatcattccgactggcgcgttgcgtttcagttcgcgataactttcatactgctgtggcggcaggcactcttcgatccatttcaggttatagggcgcgcaagcgtgggccagtttggtcgcatagttcacgtcctgactcatccagcagtcgagcattaaccagaaatcctcaccgcatttttcacgcatatccgcgaccatagcggcatctttgcggatccccgcatcgccatcatgtggcccccagtgcgtcggcattttgccaccgataaagcccatctcttttgccagatccggacgcgcacctgtggcgtagaactgaatctcatcacgaacagcgccgcctaaaagtttataaaccggaagcccgaccactttgccgaacagatcccacagagccagatcgacacaagaaatcgtattcatcaccaggccaccagagccggagtaatacagggtggcactgagcatttgatcgtggatcagtttgatatcactgacacatttaccctcaatgaaacggttaagatgtttttcgacaataaaacagcccatttcaccggctgtcgaaacggcgaatccggtctggccgttttctgcttcgacttcaacaaccaacgtgccaagaacgttaatgccaaatgactggcgtgactgctcgtaatcgcggtatttactcatcggggtggcaatatgatcgtctatccagtgattcgccccctggtcgtgataatcaccgccgccagcgcctttttctgctgtcgcaccgccagtaaaccaggcgcgaacctgtttaatttttggtagggtcatgatgttctccattgttatgaggcttgtaagtcaaagggacttttccatcccaacagacgtgaaatatccctggcgcaggcaatggccttgcccgccagataatcacggtattcttcattgatttgtaagcgggtaccgaccaccgagatcgcagcggtaagctcgttattggcgttaaacaccggcgcagcgacacaacggacatcggcgtaatcttcgccgttgtcatagctccagccctgacggcgaatacgcgccagttcttcgtgaagttgctgtggatgagtaatcgttgtgggtgtcgcctgctcccagaccagcccttcgataatactttgctgtaccgctgcaggttgccaggcaagcaggcatttacctattccggagcgataaagcgaaaggctttttccttcatgggaacgcacgctgatagtggctgatgactccactttcaaaatgtaataagcgctgccgttatcaataatccccaggtgacataacagcccggtggtatccatcagttgcgtcaaacgcggtcgagccagttcccggagatccatcttgcttaacgcatgaccggaaagctccaccagcctggtccacaaacaaaaattttcctggtgatcaaggctaagaaaacgctgacgcctgagttcattaagcagcaaataggccgtgcttttagggattcccaatgtgtcaatgatcgtcgcagcactacaggggccaatgcgggcaatcaaattgagaatatcaatagcccgtgtcagggcgggaactttgcttgattccaacatactggactccagtcttagatactggaatcagtctcgttgctcagggggagtaaaattgtgaagcgcatcaaatcccgctcctcgtccagcagactggagaaattacgcacaaatttgtgaatcagcgcacggattttttcttattgagtacaacaggttggacaaattttgccggagggggaatgtgccggtgcagtaaaccggcacagagtggcggaatcagacagataaggtcatggactcaacaacctcaatccagccatgctcactggcgatatcctggccgtttaaccaacggcgcagcatattcagtgccatcattgcgcacacttcctgacggatagccaggctgtagcgcgtagtgctgaaacgcacacgcagagcgaaagtgccgtctggcgtggctagcgcaaagttgagatgctcgttctcgaaacccgaaacagccagtgccagcccggcaaaatggttggcccgccgttctgtaatccagtgcgcagtttgcgccagggtttcctcctgtgaaggaaccacttcacacgccagcaatggagcacctgcgcgagaaagttgcaaagtcaataaaccaccggtgaattgctcgctcaacgtcaggctgaactggcggttttgcaattcgcgactgatctgcgcgggcagtccttcagtgccttcgaaaatcacgctctgtccggcaacacgtttaacatccagccacagtttttccatcgcctgttgctcgcttgccggtccggtgagtttcagttcgatgataggcattgaggagcgatagcccattgttacgcccggcggcagttgtagagtgtccaggctttgtgccagatcgctttccgaacgaccaaaagtagtcaaacgcagacaaaccggcggctgcggtaaagaaaaacgctcgcgcaggcgcggcaggatttcgtgctcgaccatcaccttaaattctgacggtacgccgggagtaaagaacatcaggcaacgattaagctgcacggcaaaaccacaggcggtgcctaccgggttattgataaattcagcactggcaggcagctccgcttgtttacggttgctcggtgccattactcgtccacgttcgtggaaatagcgttccatctctttgagccaggcttcatgcagcaccaggccttcaccttttgctgtcgcagcggcgagtgcgcttaaatcatcgctggtcggtcccagcccgccgttaacgatcagcacatcggcgtgctgactacgttcgcgaagaatggtgactaagtcatcaaggttatcccccaccgtattgcggcgagataatggcaacccctgatgaaagaaaaaatcggccagccaggcagcgttagtgtcaacgatttgcccgtgtaacacttcatccccggtggataacatttccacttttaacatggttatctcctgcttttgttatcgaatcactataacgcaaagggagataaggcgtagtaagaaactgaatggcgcgacagaatgccgcgccggaagggatcagaaactggcgttaaccccaacatacgggccgtcagccacggcgttgtcgcggttaccgtctttacccgacagattcaggtagcgataacccgcctcaatactgactggacgcataatggtgtaacgcgcgccagcattcgcttcttcataactttgaataccgctggagagcgaatccggagagtagtaatactcgccaaacaaacggaagctgttgccaattttccactgcaaaccacctcctaccgctgcggcataaccttcatcgccgtaattcgggttggtgtaaacgccttttccgccaacggtcgccattaacggcccgagaggcagattcaaccccagccccacgccagcgacatcaccgtcgtcgtcgttatgtgtccagttaccgcttaacgccaggcccgtcgtttcagtcccaaaaccgacaccaatattggtgtattctttacccgcctgaccgctgatgctcattgcattgaccgatgcagaaaccaacagcattccggccagacctgctagcgcaatttttttcattatcccctttcccacaagcaattaatcaaaattcccaaagctgcgggattgtactgcctggcacagaggattcaatgagcgaaaaaaaggatctagtcacttattgtaactaaatacttcttaaataattaaatgccgaaaaaataaacacactttatcgatacacacaaaaataataataagtacagttatcatcgcaaaagagattactgtcactttcacatatttgtgagttaccgtattctcatggtttctttttatttataaggaatatccctgtgcgacaacggactattgtatgccctttgattcaaaatgatggtgcttatttgctgtgtaaaatggccgacgatcgcggcgttttccccggtcaatgggcgatttcgggtggcggcgtggagcctggcgaacgaattgaagaggcactacgccgcgaaattcgcgaagaactgggagaacagctgcttttgacagaaatcacgccgtggaccttcagcgatgatattcgcaccaagacgtatgcagatggtcgcaaggaagagatttatatgatttacctgatttttgactgcgtttctgccaaccgagaagtgaaaataaacgaagagtttcaggactacgcgtgggtaaaacctgaagatctggtgcattatgatttgaatgtcgccacccgaaaaacgttacgtttgaaaggtcttctgtaacaatgatgacagccattactggctgtcagattgaaaatttagtggttaacgaattccccatccagataaactttgcctttttccacatgcatgactaaaccatccagataatcaggtttaaatgtcgcgtcacgcttatctttagcaatatatgtcaggcaatgattatgggtgaaaataacgatatttttatcaggcgctttgctttgtaagtccttaattgcactataaatctcattaccgcactgaagaagtcgtttatctaccgtcaattttttacccgctgaaaaccaggtagccgactgaatggtccggacggtattactggaataaagatcgaaatcagggatatcagcactaaaagcgttgcccagttcacgggcatcctgggtacctttaaccgtaatacctgttttatctgacaagcattgattggttgaacggtcgcaacgttcagcatgacgaaacaaaacgacaaccgggtgctgctgtgccagtctggccagtgttttattgtcgatacgtggcaaaccattgctactccaggcggcatgagtacccagtccggcaattgcagcgagcgccagtaaaatgatgatatatttttttgacttcaacgaagagcggcaaaaagctaacacgtaaactccacctatagacaagcgcaaccagacaattaccgtgaaattgagctacatttctggcgataattcgcagttggtgtaatattaaaaatcctacgatgtcggcaaaatgcctcaaaattttgccaaatgcaaagcctaaataagaaaaaatataaaaatttcaatatttacgtctaatattagtttcttaaggttaagttaatattctatccttaaaatttcgctccaaatggcaaaatatacacaacactctttatagcaaatataagtggacaggtattcaatggcggaaggaaaagcaatgtcagaatttttgcctttttcgcgaccagcaatgggcgtggaggaactcgctgcagttaaagaggttctcgaatccggttggatcacaaccggtccgaagaatcaggcgcttgagcaagctttttgccagttgacgggaaatcagcatgccatcgcggtcagttcagccaccgccggaatgcatatcacgctaatggcgttgaaaattggcaagggcgatgaagtgattacgccttccctgacctgggtttcaaccctcaatatgatttccttgttgggtgcaacgccggtaatggtggatgtcgaccgcgatacgctgatggtcacgcctgaagctatcgagtcagccattacgccacgcactaaagccatcattccggtgcattatgccggtgcgccagcagatattgacgccattcgcgccattggcgaacgttacggcatcgcagttatcgaagatgctgcccatgccgtcggtacgtattacaaagggcgacatattggcgcaaaaggtaccgctattttttcatttcatgccattaaaaatattacctgtgctgaaggtggcctgattgtaactgataatgaaaaccttgcccgccagctacggatgctgaaatttcacggtctgggtgtcgatgcctatgacagacaaacctggggccgtgcaccgcaggctgaagtcttaacaccgggctataagtacaatctgaccgatattaacgccgcgattgccctgacacagttagtcaaattagagcacctcaacacccgtcggcgcgaaattgcccagcaatatcagcaagcactggcagctctcccctttcagccattaagccttcccgcctggccgcacgttcacgcctggcatctgtttattattcgtgtcgatgaacaacgttgtggtatcagtcgcgatgcgttgatggaagcgttaaaagaaagaggcattggtaccgggttacatttccgcgccgctcacacacaaaaatattatcgcgagcgttttcccacgctgtcgttaccgaataccgaatggaatagcgaacgcatctgttctttgccgctgttcccggatatgactaccgccgatgccgaccatgtcatcacagcccttcagcaactcgcaggacaataagccatgtttgaaatccaccctgttaagaaagtctcggtggttattcccgtttataacgagcaggaaagcttaccggaattaatcaggcgcaccaccacagcctgtgaatcgttggggaaagagtatgagatcctgctgattgatgacggcagtagcgataattccgcgcatatgctggtcgaagcctcacaagcggagaacagccatattgtgtctattttgcttaaccgcaattacgggcaacattcagcgattatggcgggattcagtcacgttactggcgacttaattattacccttgatgccgatctccagaatccgccagaagaaatcccccgcctggtggcaaaagccgatgaaggttacgacgtggtagggactgtacgccagaaccgccaggacagctggtttcgtaaaaccgcttcgaagatgattaaccggcttattcagcgcaccactggcaaagcgatgggtgattacggttgtatgctgcgcgcctatcgccgtcatattgtcgatgcgatgttgcactgccatgaacgcagcacctttatcccgattctggcgaatatcttcgcccgccgtgccattgaaattccagtacatcatgccgagcgtgagtttggtgaatccaaatacagttttatgcgcctgattaatttgatgtacgacctggtgacctgccttaccacaacgccgctacgtatgctgagtctgctcggcagcattattgcgattggaggttttagcattgcggtgctgctggtgattttacgcctgaccttcggaccacaatgggcggcagaaggcgtctttatgctatttgccgtgctgtttacttttattggcgctcagtttatcggcatgggattactcggtgaatatatcggcaggatctacaccgatgtccgcgcccgcccccgctattttgttcagcaagttatccgtccatccagcaaggaaaatgaataatgaaaaccgtcgtttttgcctaccacgatatgggatgcctcggtattgaagccctgctggctgccggttacgaaattagcgccatttttacccatactgataatcccggtgaaaaagccttttatggttcggtggctcgtctggcggcggaaagaggcattccggtttatgcgccggataacgttaatcatccgctgtgggtggaacgcattgcccaactgtcgccagatgtgattttctctttttattatcgccatcttatttacgacgaaattttgcagctcgctcccgcaggtgcatttaatctgcatggttcgctgttaccaaaatatcgtggtcgcgcgccgctgaactgggtgctggtcaacggtgaaacggaaactggcgttacattgcaccgaatggtgaaacgtgccgatgccggggccattgtggcgcaactgcgcattgccattgcgccagacgatatcgctattacgctgcatcataaattgtgccatgccgcgcgccagctactggaacagacattacccgccattaaacacggtaatattctggaaatcgcccagcgcgaaaacgaagccacctgttttggtcgcagaacgccggatgacagtttccttgaatggcataaaccggcatccgtactgcacaacatggtacgtgccgttgccgatccgtggccgggtgccttcagctatgttggcaatcagaaattcaccgtctggtcgtcgcgtgttcatcctcatgccagcaaagcacagccggggagcgtgatttctgttgcgccactgctgattgcctgtggcgatggcgcgctggaaatcgtcaccggacaggcgggcgacggcattactatgcagggctcgcaattagcgcagacgctgggcctggtgcaaggttcacgcttgaatagccagcctgcctgcaccgcccgacgccgtacccgggtactcatcctcggggtgaatggctttattggcaaccatctgacagaacgcctgctgcgcgaagatcattatgaagtttacggtctggatattggcagcgatgcgataagccgttttctgaatcatccgcattttcactttgttgaaggcgatatcagtattcattccgaatggattgagtatcatgtcaaaaaatgtgatgtcgtcttgccgctggtggcgatagccacgccgattgaatatacccgcaacccgctgcgcgtatttgaactcgattttgaagagaatctgcgcattatccgctactgcgtgaagtaccgtaagcgaatcatcttcccgtcaacttcagaagtttatgggatgtgtagcgataaatacttcgatgaggaccattctaatttaatcgtcggcccggtgaataaaccacgctggatttattcggtatcaaaacaattacttgatcgggtgatctgggcctatggcgaaaaagagggtttacagttcaccctcttccgcccgtttaactggatgggaccacgactggataaccttaatgcagcgcgaattggcagctcccgcgctattacgcaactcattctcaatctggtagaaggttcaccgattaagctgattgatggcggaaaacaaaaacgctgctttactgatattcgcgatggtatcgaggcgttataccgcattatcgaaaatgcgggaaatcgctgcgacggtgaaattatcaacattggcaatcctgagaacgaagcgagcattgaggaactgggcgagatgctgctggcgagcttcgaaaaacatccgctgcgccatcatttcccaccgtttgcgggctttcgcgttgtcgaaagtagcagctactacggcaaaggatatcaggacgtagagcatcgtaaaccgagcatccgcaatgcccaccgctgcctggactgggagccgaaaattgatatgcaggaaaccatcgacgaaacgctggatttcttcctgcgcaccgttgatcttacggataaaccatcatgaccaaagtaggcttacgcattgatgtcgatacctttcgtggcacccgtgaaggcgtgccgcgtctgctggaaatcttgagtaagcataatattcaggccagcatttttttcagcgtcggcccggacaatatgggccgccatctctggcgactggtgaagccacagtttttgtggaagatgctgcgctcaaacgcggcatcgctttatggctgggatattttactggcaggtacggcctggccaggtaaagagattggtcatgccaatgccgatatcattcgtgaagcggctaaacatcacgaagtcggcctgcacgcctgggatcaccatgcctggcaagcccgtagcggtaactgggatcggcaaacaatgatcgacgatattgcacgcggtcttcgcactctggaagagattatcggtcaaccggtaacctgttctgccgctgcgggctggcgtgccgaccagaaggtgatcgaagcaaaagaagcgttccatttgcgctacaacagcgattgtcgtggggccatgccgttccgtccattgctcgaatcaggaaaccctggcactgcgcaaattccggtgaccttacccacctgggatgaagtgattggtcgggatgtgaaagcagaagattttaacggttggttactcaaccgcatcctgcgagataaaggcacgccggtttataccattcatgcagaagttgaaggctgcgcttatcagcataattttgtggatctcctcaaacgcgcagctcaggaaggcgtgacattttgccctttaagcgaactgttatcagagacgttgccgctcggacaagttgttcgcggaaatattgccggacgtgaaggctggctgggttgccaacaaattgcgggtagtcgctgatgaaatcggtacgttaccttatcggcctcttcgcgtttattgcctgctattacctgttaccgatcagcacgcgtctgctctggcaacccgatgaaacgcgttatgcggaaatcagtcgagaaatgctggcatccggcgactggattgtgccccatctgttagggctacgttatttcgaaaaacccattgccggatactggattaacagcattgggcaatggctatttggcgcgaataactttggtgtgcgggcaggcgttatctttgcgaccctgttaactgccgcgctggtgacctggtttactctgcgcttatggcgcgataaacgtctggctctactcgccacagtaatttatctctcattgtttattgtctatgccatcggcacttatgccgtgctcgatccgtttattgcattctggctggtggcgggaatgtgcagcttctggctggcaatgcaggcacagacgtggaaaggcaaaagcgcaggatttttactgctgggaatcacctgcggcatgggggtgatgaccaaaggttttctcgcccttgccgtgccggtattaagcgtgctgccatgggtagcgacgcaaaaacgctggaaagatctctttatttacggctggctggcggttatcagttgcgtactgacggttctcccttggggactggcgatagcgcagcgggagcctaacttctggcactattttttctgggttgagcatattcaacgctttgcactggatgatgcccaacatagagctccgttctggtactacgtgccggtcatcattgccggtagcctgccgtggctgggattactccccggtgcactgtacacaggctggaaaaaccgcaagcattccgcaaccgtctatttgttgagctggacgataatgccgctgctgtttttctccgtcgctaaaggtaaattgcccacctatattctttcctgctttgcatctctggcaatgctgatggcgcattacgctttgctggcagcaaaaaataatcctctggcgctgcggattaatggctggattaacatcgcttttggcgtcactggcattattgccacatttgtggtctccccgtggggaccaatgaacacgccggtgtggcaaaccttcgagagctataaagtcttttgtgcctggtcgattttttcgctatgggcatttttcggctggtacaccttaacaaacgtcgaaaagacctggccttttgccgcgctttgcccgctggggctggcgttgctggtaggattttcaattcctgacagagttatggaaggaaaacatccgcaattttttgtcgagatgacacaagaatcacttcagccaagccgctatattcttactgatagcgtcggtgttgccgcaggtctggcatggagcctgcaacgcgatgacatcatcatgtatcgccagacaggtgagttgaaatacggccttaattatccggatgcgaaagggagatttgtcagcggtgatgagttcgcaaactggcttaatcaacatcgtcaggaggggattattactctcgtgctttcggttgaccgcgatgaagatatcaacagtctcgccattccgcccgcagatgccatcgatcgtcaggagcgtctggtgctgattcagtatcgtcccaaatgatctggctaacattagtctttgccagcttgcttagcgttgccgggcagttgtgtcagaaacaggcaacctgctttgtggcgataaacaaacggcgcaaacatatcgtgctgtggctgggactggcgctggcttgtcttggtcttgccatggtgctctggctgctggtcttgcagaacgtaccggtaggcattgcttacccgatgttaagtctgaattttgtctgggtgacgctggctgcagtaaaactgtggcacgaaccggtatcgccgcgtcactggtgtggggtggcgttcattattggcggcattgtgatcctcgggagtacggtgtaatgggcctgatgtggggattattcagcgtcattattgcctcatttgcgcaattaagcctgggttttgcggcgagtcatctgccgccgatgacgcacttatgggattttatcgcggctctgttagcttttggcctggatgcccggatactgttactcgggctgctgggttatctgctttccgttttttgttggtataaaacgcttcataaacttgcgctaagcaaagcctatgccttgctcagtatgagttatgtgctggtatggattgcttcaatggtacttcccggctgggaagggactttttcgctgaaagcactactgggagtagcctgtattatgagcgggttgatgctgattttcctgcccacgacaaaacaacgttactgagttttccctgccactttacactgccgttcccactcatcggggctataactgcttgccgagaggactttcaccgtatgcagcttttcacgattaatacaataaagcgcattctgcaaaggcgagagtaaatcccccactttcacggcgaagtcactcttcacttcggcgatcatttttatcgcgccgccagcatcgcagagcataagtacatgtctgttatcttgtttattgcagcacgattttttgaccagccattccattgcattatcctgtttgctaagagttttcacatcaatttacagattaacagataaactctttatcaacggcaatggaatggcagaaatgagaagtgaaacggagggttaattattgctgacgttgcacccactcttttagcgcctgacgtgaaattttaataccgccgtttttcagctccggcggcagagttagccagcgcaccggttgttgaaaacgggccagcttatctttcacccattcactaagatcaacgctctcgtggtcatactccatcaccgccaccggtcgatgaccaaactccttgtcggcaacggggacgataaacacctgcaaaaccgcaggatgtgcagcaattacgcgctcgacttcttccggctgaataccctctccgccactgaagaatagattgtctaaacgtccgacaatggtcagcttgccattatgcatctcaccgcgatcgcgcgtagcgtaccagccttcgtcattaaccagtgaaaccagttgcccgttacgccagtaaccttctgccatactggcagcccgcagccacacttcattattaacgattttcacttcccgacccggcagcggcgaaccaacgtctgccaggccgtcggcttctttcgcacacaccgtggaggcaaactcggtcagaccatagccgcaaaagcaacgaatcccctgctcgcgcgcctgttccgtcaactcgaccgggatagccgcgccgccaagtaacaccgctttcagggaaacggaactacggttaaccagcaaacgccagagttgtgttggcaccagtgaagcgtgagtacagcctgccagcatttgctccaatggctgtttatcacgtaccgtcatccgcgcaccagcgtataaccagcgccacataattccctgaccggagacgtgaaacagcggtaaagagagcaaccaatcatcgtgatcgccaaacggaatcagcgataacacaccttgcgcactggcaagatgggcctgataagtatggacagcggctttcggcaaaccggtagaacccgaggtcaacgtcattgagcacagacgcgtcggctgccacgtagcggcatgtgcgccttcaaccagctgaatgtgcagcgacgttaatgccggaaacgtgttttccccatccggcaccagagcaaattgcagcgtcagattgggcagcaattcttcaagcaacggttgcggcagctgagggttcacgggcaacacccgcgccccgcattgcagtaacgccagccaggcgagcagcgtttgcggcgtattccacgcccgcaacatcacgccgctgccctcaaccaccccctgcaccgcaaatccggaggctaattcatcgacgcgagcacaaagctcgcgccagttgagttgctcgtcattaagacgtaaggcgatggtttctccccgcacttgccgccagtgacgccacggccagtcagagaagatcataacaaccgctccagtgcatcaacttccacgacaggcagcgtgctacccggccagcgacgtacctgctgcgcctgcatcagatccagcgtgtccagccctggaatggtgtccggcgttaaccaggcggcaatccgcgccagttgcgttaagcctaagctcgattcaatggaagaactgatcaccgccgtcagccccagcgcgtgcgccgcctgtacctgctcgcgtactttttccagactgcccgtgagcgtgggtttgataactaccgcgcgcacgccctcttcagccacaaaggcaaaatccggctcgcgcaggctttcatcccaggcaatggcaatgccggtttcacgggcaaacgctcgcgaatcatcgcgggttttgcacggctcttcgagaaacgcgatgcggtcgcgataatccgggttaacgtatttggcaaactgctgacctttcagcggtgtccaggcgcgatttgcgtcaagacgcaaatgcagatccggaattgcctccagcaacagattcaccaccatgccgtcgcgcaccgcttcgtacaatcccactttgaccttcgccactttctcgcctggcatatctgcaagtttgaggatcagatcgtccggatcgccattacacagcggtgccgcacggtagttggctgcttgcggcaacgtatctgtcagttctgccaatgcacagcttacgccaaaggccacggaaggcatctgcggtagctcgcaatcgcctgccagccagttatttacccaggcaagcagcacactttgcgcctcttcccaggtttcctgactgaagcccggcagtggggagatctccccccacccttcgcgctcgccttcacgcaggcaaacatacagcccgtcgcgggtttttaaccgcctgtcgcgcagaaccacccccgcgtccatggggatctgccagcggtatacctgcgcgctacgcattacggattccgtttgaatttgctgaagtcaggctgacgtttctggttgaaggcgttgcgaccttcctgaccttcttccgtcatgtagaacagcatggtggcgttgcccgccagctcctgcagccccgcctgcccgtcacagtcggcgttcagtgcagctttcaggcagcgcagcgccatcgggctgttttgcagcatttcgcggcaccaacggacggtttctttttccagatccgccagcggtaccacggtgttcacaaggcccatatccagcgcctgttttgcgtcgtactgacggcacaggaaccagatttcacgcgcttttttctgcccgacgatgcgagccatgtaggaagcgccccagccgccgtcgaaggaaccgactttcgggccagtctgaccgaagatggcattatctgccgcgatagtcaggtcgcacatcatgtgcagaacgtgaccgccgccgatggagtagccagccaccatcgcgacaaccggtttcggacaggtacggatctgacgctggaagtccagcacattcaggtgatgtacgccggaatcatctttatagccgccgtaatcaccacgcactttctggtcaccaccggagcagaacgctttatcgcctgcaccagtcagaatgatcacgccgatgttgtcgtcataacgcgcatctgccagcgcctggatcatctcttttaccgtcagaggacggaaggcattgcgcacctgcggacgattaatggtgatttttgcgataccgtcggtggatttttcataacgaatgtcctcgaaaccttcggagcagtcgtgccattcaaccggtgcgtaaagcattgcttcatcaggataaatcatattgtgtcctttagtcagaaacgcaagatctgcgccagacttgcgattacgccagcgggattttcccgatgcgcgttatgtccggcgcgaggaatgacatggcagtcggcagccagttccgccgccagggcgcggaatttgctgtcacgttcaccacataaataataaaacgcaaatgtgcgggcgctaaggttagcacgtaaatcaggctggacggcgagagaagtcgcctccagcatggcggcaagcgttgcgccattattgttgctgcgcagcgccaccagctcccggcgttgatcgtcattgagtgaggcaaaaacaggctgttgataccagtcggcaaataccgccgttaacggttctgtgagaaaacgctgcacccattggcgatcggaacgctgacgttccgcacgttgttcagcattttgcagccccggatgcccgccttcgacaataaccccacaaagccccgccagcccctggcaagccgccatcatcgccacccgtccaccaagcgagtaccccaccagccagaagtcaaggatgttgtaactaaccaaggttttacgcagtaagtcggtgacatcatcaaatccatcgacgctaatcgccgccgaaccaccgtgacctgggagatcaacatacaaccgtgagtagtcggcaaacgcctcgcccacttcttgccattcgtggcaatcgccggaaaaaccgtgcaaaaacaccagccagggtaaacctggttttccgtgttttgcctgcgcgtgcaggatcataaatggcttacctgcgccagaagttgctggagcgtttgcgcaccatcggtgtcgttaaccaccatttcaatcaccgtggtggttggcgtgcgccaggcgtcggcaaatgccgtttcaagttcctgccagttttgcggacgatgatatttcagctcgaacatcgcggcggcgtgctcaaaatggacgttttgcggcatcagatagaaacgctcacgctcgctttgcggcgttggcaacagcgagaaaatttgcccgccgttgttgttcaccacaattaataccagcggcgcagaaacctgacgcaataacgccagcgcgttgagatcgtaaagtgcggagagatcgcccacaatcgccagcgtcggtttgccgcttgcccgctgaacgccggcggcggtcgaaagcagcccgtcgataccgctggccccacggttgctgtacaccgggtaacctgccggaagttgcgaaagcgcatcaatcagacgtaccaccaggctgttaccaacaaacaattgcccctgttcaggcagatagtcgcagatgcgatgcgccagttgcgcttcgccaaacgcatcacggcgggcaataaccgcctgcattgcctgttccgccaggcgcgggatttcaacgcaccagggctggcgtttttctgccggatgcagctccagccagtcggcaatattggcaattaagcgacgtccgcgatggtgtgccggatcaagtcgcccttcaatgtcatcaacaatccagtactcttctggttcacagcttgcctgccattgcaggagccgtttccccgtcaggctgcttcccagttgcaccacaatttgcgcctgctgcagctcgctggtcgctttggcattgcctaaccaaagatcggcacacggcagcggctgcccggtttgtgacagcacatcgccaatcagcggccagccaagagtttgcgcccacagggcaacttttttgccctcttccgcactcatgcgcccggcaaccaccacgccgcgcttttgtcgccagaagaaccagtcgcgctgtttttcactttccagacgaggcgcttcacgcagccacggtttgtcgtcctgccaccagtcacccagacgctgttgccagctaagcccggtatcgtccatttcgccatacagcggttcagcaaacgggcagttgatatggactccccccgcatgaagcgtaccgagagcgtggtcgatggtagaaaccagccaacgtgcggggatatcctgggtcgggcgcggcaatgaaatactgtgcgtggggtgagaggcgaacattcccggctggcgaattgcctgattcgcgccgcagtcaattagctccggcgggcgatcggcggttaagagaatcagtttttctccggttaacccggcttcaatcagtgccggatagagatttgccaccgccgtgccggaggtcacaatcaccgccaccggctgcttgctgactttcgccagccccagcgccagatgccccaacccacgctcatcgaaatgggtgtggtgaatgaatgcggaattctccgccgccgctaacgttaacggtgtagaacgcgagcctggggcgatacagatgtgtctgacgccgtgacgcgttaatgcttccagaatgaccgccgcccagcgtcggttaaatgcgcttactgacatgagtttgtccggtatcaatattgcggctaagtataaggagctacaaaaatagattattgatatgaatcggtaatgatgcgactcattactattccatttgtaataaagtacgcagccctgccgctttgttgtcgatttcctgccactcttgctcggggtcggaaccacggacaatgcccgcgccagcatataatcgcacgacattgccgctaatttttgctgagcgcagggaaacgcagaattcgctttgttgtaatgagagatagcccgcagaaccggcgtaccattctcgggtgaacggttcgtgacgggcgataaactgtcgcgccagatcgcgcggtaagccagcaactgctgccgttggctgcaactgatgtaaacagatcacatcatccgctttgttgagtgaagtccagatacagcggcgaagatgctgcactttacgcagacgcagtacctgcggcggtaaaacatccagcgtctgggtatcggcctgtaatcgttgacagatatcttccaccaccagcatgttctcgcgctggtttttatcatccgccatcagccactctcctaactgctgcgcctgcttatcatcaggattatttgctactgttcccgccagcgcttcagtacgcagcgctttgtcacgccgccgccataaccgttccggtgaagagccaagaaaagcattttcgccatcaaaggccatgtaaaaatggtagcaattcagattcagtcgacgactggcagccatcatcgccgccgcgttgaccggacttgcgaaatgcaggtcagttgcccgagcgagcaccactttgtcgagctcaccttcggcgatggttttcgttgccagttcgattaattgcgtccagcccgttttgtccggccagtgttgttctcgcgtggtggttaaatgtaacccaggcaagggcttgatactcaccagtgtggcgataaattcttttgcctgaatcgcatcgtgctgaagggagctttcgctgaatagcgtcagccgcagcgtggctttaccgccacagcgtcgccattccaggcggggtaaaagtaaattgccctgcgacgggtcaaaagcattcagcccccaaatgcgtaagtcggcgtgttccgggtgctggcgaagaaaacgttgtgcctggtccaacgacgtaaaacgggtaatcgcgcccaggacgacagcttcttcatcaccattacgttgttgccagtagaattgcgggtatgtttgctgactggccagccagctcaaggcatcaaaagcgtctttgagagggaaaggaatatcgataacccgaatgccgggtgtcgccggaatctcttgcgacaaatggcgcagtagattttccagcgccgtagtaagtgattgcacgcggacctctccctgttaaaagcctcacattatacggggtactacaaaaaaaaatgcagtaccccggtgtagggaggttttaacggcgtgccagcaacagtcctagtaccagcccaacggccgcgcccacaccaattccttgccagggtttttcgtggacgtagtcatcagcacgataaactgcctgcttcgcccgatagtaataactgtctgaagcctggctaacccgttttttcacatcatccagcgctttttctgcacgcgctttcagctcaacatatttctgatcggcgggatcgccagaggagcggagcacctcttccagtgtttcactaagcagcgtcaggtcgtcatcgatacgtgtatcaccaaactgattagacattctcgttctccatttgcgtaaaacctgtcactaactatagacaagggttgttgattacgcctgaattacctcgcgtgccatcccaatgtgtgggataccatcttcttcatagacctccgtcacagggataaaaccgaaactctggtagaagttttgcagatgcgcctgcgccccgaggtaaacaggcttatcaggccagtgatgcgtacatgtttcgagtgttttactcatcagctgctgccccactttttcgccacgcaacgcttcactgacaatcacccgacctataacgaccggctcaagatcatcatcacttttcagaatcctcgcatacgccaccagttcatcatttttccaaccgagaatatggcgattatcccccgtcaaatcatcaccatcgatatcctgataagggcaattctgctcgacaacaaacaccgcgcaacgcagttgtaataaggcataaagctgggaaaccgataattcagagtgatgcagatcttgccattcaatcataatgctctccttttagatgtatgccttatactagccggaatattttttgaaacgtgatgaactcatggaattaatttttttaggtacttcagccggtgtgccaacccgcacgcgcaatgtcacggcaatattgcttaacctgcaacatccgacccagagcggactttggttgtttgactgcggtgaaggcacccagcatcagctactgcataccgcctttaaccctggaaaactggacaagatttttatcagtcaccttcatggcgatcatctttttggtttacccggcttgctgtgcagtcgttctatgtcaggcattatccaacccttaacgatttatggtccgcaaggtatccgtgaatttgtggaaaccgcgctgcggattagcggctcatggaccgattatccgctggaaattgtcgaaattggcgctggcgaaattctcgatgatggcctgcgcaaagtaaccgcttatccgctggaacacccactggaatgttatggctatcgtattgaagaacatgataaaccgggtgcattaaatgcccaggcattaaaagctgctggcgtgccgcctggcccactgtttcaggaattaaaagcgggcaaaacaatcacgctggaagatggaaggcagattaacggcgcagattacttagctgctccagtgccaggtaaagcgctcgctattttcggcgataccggcccctgcgatgccgcacttgacctggctaaaggtgtcgatgtcatggtgcacgaagcgacgctggatataaccatggaagccaaagccaatagtcgcggccatagctctacacgccaggctgcgacactagcccgtgaggctggagtcggcaagctaatcattacccacgtcagctcgcgctatgatgacaaaggttgtcagcacctgttacgtgaatgcaggtcaattttcccggcgactgaactggcgaatgatttcaccgtgtttaacgtttaactctgcttattattaaaaacagggcgaaacttgccctgttatcgcaacccgcgctacatatatccacccacacaggcatattgagcgatttttgatatttattcatctccttacgcactatattcagagcaataagttgcctcttttcatcttgattcagcacaacctttgcaactaaaaggagcccatgatggttacagttgtcagcaattattgtcaattatctcaaacgcaactcagtcagacatttgcagaaaaatttactgtgaccgaggaattactgcagtctttaaaaaaaacagcgttatccggagatgaagaaagcattgagttactgcataatattgcgttaggttatgataaatttgggaaagaagctgaagatattctttaccatattgttagaaccccaacaaatgagaccctatcgattatccgacttatcaaaaatgcttgtttaaaattatataatctggcacatatcgcaaccaactcccccctcaaatcacatgattcagatgatctcctgttcaaaaaactattctccccttcgaaattaatgacaattatcggtgatgaaattcctcttatatctgaaaaacagtcgctttcaaaggtgcttttaaatgatgagaataatgaactgagtgatggtacaaacttctgggataaaaatcgtcaattaaccacagatgaaatagcttgctatcttcagaagatcgccgctaatgcaaaaaatactcaagtcaattatcctactggtctctacgtcccctactccaccagaactcacctggaagacgctctcaatgaaaatattaagagcgatccatcatggccgaatgaagtccagttattccccataaatactggcggacactggatattagtttcgctacagaaaatagtaaataaaaaaaataataaaccacaaataaaatgcgtcatattcaactcattgcgtgcactaggctatgataaagaaaattcacttaagcgtgtcattaatagttttaattctgaactcatgggagaaatgtcgaataataatataaaagttcatttaaatgaaccagagataatatttttacatgccgatcttcagcaatacttaagccaaagttgcggtgcatttgtgtgcatggcagcccaggaagtgattgaacaaagggaaagcaattctgacagcgccccctatacgttattaaaaaactatgctgacagatttaaaaaatattcagcagaagagcagtacgaaattgattttcaacatcgactggcaaacagaaattgttatttagataaatatggcgatgcaaatatcaatcattattatagaaacttagaaataaaacactcacaacccaaaaatagagcatccggcaaaagagtgagttaacatcattgttaattaattcgaccagtcagcaaatatgctgactggtcgaacatagtttgctaaacagtcatcactgactgatgtcagtcacaccatccgccagttcaatcaggcgaataaattccgccctgtaaccctgtggatcttccccttttgcctgctgagcccactgtttgatctgctgccaggaggtattgttcaggtattcagaaccgcgtaacttttgcccatatgcagctactgctgcgcgaaaacgcatatcttcagagggcgcgtttattgttggccccagcgggaattcaactaactgactttcttttccctgcgggtatttccagcgaatttttaaccaggccagttctttcgttttgtccgatttcgctaatttgttatccggggcatagcgtaacttatcaattgatgctttttgcccgttcagcgttaattcgaataacaacgttatatgtttgcctgcgcctatatcccctgcatcaacgttgtcgttattaaaatgttccacccgaagttggcgcttttcataaccaatctgacggtattccgttacccacgcggggttaaactcaatttgcgctttgacatcttttgctacggtaatcaacatctgccgcatttcactattcaatactttctgcgcttcagagagggtatcaatgtagctgtagttgccgttaccaacatcggcaattcgcaccatcattgcctcgttgtaattgctattccccacgccaaacgtcgacagagtaacaccagactcccgctgttttttgaccattgattcaatcgattttggatcgtcaatgccaacgttaaagtcaccgtcagtggctaataaaatgcgattgatgccgcccttaataaaccccttcgtcgcctgctgataagccagttccagcccggcaccgccattggtactgccttcggcatccagcgaatcaattgcggcattaatttccgccttatgactcccggagatagaaggcaatgcaatacgggagtcgccagcgtaggtcacgatggcaatgttatcctgctcacgaagttctttgaccaataatttcaacgaagactggataagtggcaaacgttcatcagaaatcattgaaccagaagtgtcgataagaaagaccagattagaagctggtaactcttcacttttgcgatctttcgccaggatatcaactttcagcaatgttcgctgttcattccatggtgcaggtgccaattcgtagcgcatagcgaaaggtattggcttagaggccggaatagattgtttgtctttgatatcccaatcagacgggaaataattgactatctcctccacccgcacagcgtctggcggaggtaacagcccttgattgaggaaacgccttacattcgcataactgccagtgtcaacgtcaagactaaacgtcgccaacggattttgcgctacctgcttaaccggattatcatcgaactgctggtagcgagcggttcctggatttgcgatatgtgtagcttttgctttagccgctcttgcaaatgttggcgcttcctgcaatcgcccctgtaaagcctgtttgtctgaatattgttgcacttcttgctgggccaaggctttcgcggcggcggcgctttgctcagcctcttttattgcagcttgctgcgcggcaagcacttgctgctctgtgggagtactgggttgttgttgctgactttccttattctcaggttgcggcccacatcctgacaaaatcaaactactcataagcaacatgattatatttttatttcgcatataaaatccttttaaataaactcaggcaccagacataaaatatactctttgtataatcctgctaatcttaataaaatacaatatcgaaacccatagcaaataatgattcaacaacgcaacccattaataatttgcatatgaaaaaaataatctttgcttttattatattatttgtgtttttactccctatgattattttttaccaaccctgggtcaatgcattaccgtcaacgccccgacacgcaagtcctgagcaattagaaaaaacagttcgttatcttacacaaactgtgcatccacgtagtgccgacaatattgataatctgaataggtccgcagaatatataaaagaggtctttgtcagtagcggtgccagagttacctcgcaggacgtccccattacgggtggcccctacaaaaacattgttgctgattatggtcctgccgatggaccgctgattattattggtgcgcattatgactctgccagcagttatgaaaacgatcaattgacctatacgccgggcgcggatgataacgccagcggtgtggcaggattactcgaactggcacgtttgttacatcagcaagtaccgaaaacaggcgtgcagctggtcgcctatgcgtcggaagaaccgcccttctttcgtagcgatgaaatggggagcgcggtgcatgcagcttcgcttgagcgtccagtgaaattaatgatagcactggagatgattggctattacgactctgcgcctggaagccagaattacccttacccggcaatgtcctggctttatcccgatcggggagactttattgccgtggtcggcagaatacaggatatcaacgccgttcgtcaggtaaaagcggcattgttgtcatctcaggatttatctgtttattctatgaataccccagggtttattcccggtattgatttctctgaccacctgaattattggcaacacgatattcccgccataatgattactgacaccgctttttatcgtaataaacaataccacttgcccggtgataccgcagacagattgaattatcagaaaatggctcaggtagtggatggtgttataactttgttatacaacagtaaataataaaaatttctcgaggcgggtccagaaaaagcgacatgcacattttattttccctcatctgttttaagatgcgaaacatgaaattcaacggaggaaaaataaatgggaatgattggctattttgcagaaattgactcagaaaagattaaccaactgcttgagtctactgaaaaacctttgatggataatatacatgacacgctttcaggattacgccgactggatattgataaacgctgggattttttacactttgggctgacaggcacctctgcttttgatcccgcgaagaatgatccgctgagtcgtgccgtgcttggtgaacacagcctcgaagatggcatagatggcttccttggattgacctggaatcaggagttagccgcgacaatcgaccgactggaatcactggatcgaaatgaactgcgtaaacagttttccattaagcgactcaatgaaatggagatttatccgggagtgaccttttcagaagagttagaggggcaactctttgcctcgatcatgcttgatatggaaaagctgattagcgcgtatcgacgtatgctgcgacaagggaatcatgcgctgacggttattgttgggtgatatagcttgatgcctgggggagaaagacccattagttaagatttacgccaggatcatcttgaaaaaatctttaaccatggtccggtttttatccccttgtataaatattactaaatgcttgcttagtcgcattgttaaatgcaataccgtatattcggtatgtaacagcgatatcctctgtgctggcaacgatctgtcatgcttgatgaaaacggaattgaacctgtcattaccaggtagataaaaagcctgttcaattttgggattattttttataactcgtgtctgttatggcgacacgggaaaacatcaatattgtccttcacaaattgcagtaatatagaatcaacctctcttgcaagttggtcacaatgtattataagcattttgaatatgtcatcctctgtaatctcgtgaaaattttcggccttgtcttttagctcatcatatcggattcttgcagtaaccattttttgggcgagttctaataaccccaaagcttgcaattgctggtgagtatgatcactttcaaaaaatatcccacactccattccttcccaaccaacatattcatgccattcataaaccagcataaatgtttgtaaaactggcggtaataattggatatctgcaaaaccaaaccaaaacttacgcttgagatcccactcatattcaatcgccaatgctatattgtttaaggcatctccggcatccttatttttacgcaaaatcaattccgtcagtgtatagcgttgttcatcaatacgccgaagagcttctgcaatatcatagtttgtagccaacaaaacattctctgcttcctgatgagtgacgtctgcttttgccgtcaatatattgatttggtcaatatgaaacaacttgatggcttcatcaacatcaccgccagtcctctctaacaaacgtctggcaacctggataccgacaggtacgttcttccgaagtttacgaatttcacttaaccattccatgtcaaacccctttaaatatttatgatattaaatataacaacgtctggataacgacccggcctgactgaatatctcacgttttcctgcttaacattcatgttatgatgctcttgaaactaataatacgtatggaattgtcactatttatctgctaatgaattcaaacaatgtcattcgtttgatgaatatattatttcagggaataattatgacacctttagaacgcattacccaacttgttaatatcaatggtgatgttaataatcctaatactcctcgtccattgttatctcttgaggatttttttattgacaataatatccatggttcaatatgttgcaatgtgattccagaacaatctccgcaagctatctatcaccattttctgaaaatacgtgagcgtaacaatgttagtgatgttttggtagaaattacgatgttcgatgacccagactggccctttagtgaaagtattttagttatcaccactgcttcaccagaagaagttcagagctggtttgtagaagaaattgcccctgatgagtgctgggaaggatggtcagaagatacggagcatggatgggttgaagtccctgtgggtatgcatccggttacttgttggtgggattaaaacatttatataaacagataagcggatgtttacataaatttttatgtgaaggaacatgatgaaacttattcctcgcagtagtgatatttcacctggcattgatggaatttgcccggggccttttcctccgaacggatttaccgtacttacagatgcagcatatggtaacggagactgtttcggtttgtactggcctattggtcaggagcataaactacctatagtgtgcgaaacgtaccatgacgaatggcgaatcgtacctgccttttccagcattaagaagttcgaagaatggctggaagtgaatgatgatgatccccatgaaaatggcatcagcatcgaagatcaagactttgcagcaaatctcttccgtgttgctcggaaatgtctttcaacgggaaggcttgatgacgcactgccactgttacagcgagcaacagaacaattgcctgaagtcagcgaatattggttagcactggcaatccagtatcgccgatgtaaaaaaacagaagctgcagcacaggctgcgcttaatgcttatcttggcaattgggcatttggtgttcctgacaataaagtcattcatttgctgtcacaggccgcagatgtcccgaatttccaggatgatcctgtgattcagtgcattaaagaacaaggattagatcttagctttggaggaacaaaggaaaataataattaccccttgatgcagatgtgtgttgatacttattttgcgcagagaaaaccgcttcaggcattaaccctgttacataattatgcctggataatgtccagtgaaacgactgcatttcaggaacgctatgattttaatatcgatgaatggcgggcaaaattcaggcagttatgtttagagtattttggcgatagtcgtacacagttcacttaacgctctgcgtctatctactatcccttctttttcagaaaaaccgccgagcatgtcggcggctttctgacttacaaagtaacagattacatcagcggcattgccaaacgcacaatgctaatcagcggttgtggccatacacccagcaccagtaccaacagtgcagagatcagcacaacgataccgcccgcgctgtactgccagtttgatggtgcatcgcgacccggttgttccggggcgtgaagatacaggctcaccgccacgcgcaggtagtagtagaggccgattgccgaaccgacaaccacggcacccaccagccaccacaagtgtgcctggacaccgaccgccagcacgtagaacttaccgataaagcccagcgtcatcgggataccggccagagacagcatcatcaccgtcatcactgccgcgaggatcggacgatgccagaacagaccgcggtaagagaacagggaatcagcatccgggccacgatacgggctggacatcaggctgaccacgccgaacgcgccgaggctgctgaacagataaccggccaggtaaacccctaccgcttccatcgacatctcgccggtttgcagcgcaatcagcgctaccagcagatagccgaggtgagagatagatgagtaaccgagcagacgtttgatattggtctggctcagcgccatcaggttaccgaagatgatggaggcaaaggcgataatcgccagcaccacgcgaatcgcttcgctgtcacccaccggtgcgtagaggaacagacgcatcaccacaccgaagatagcgattttgctcgccgtcgccaggaaagtggaaaccggcgcaggcgcgccctggtatacgtctggcgtccacaggtggaacggcaccagagagagtttgaagccgaggccaacaatcatcaggccgaaacctgccagcaacagcggctcgttgagcataccgtcgccaaggtttttacccaacgcgacaaacgacaggtcgccagactgcgcatacaccagcgccataccaaacagcaggaaagaagacgctgcggcagaaaggatggtgtatttgatactggcttccagtgaacgtttctggcggaaagcgtaaccgaccaggccaaacagcggcaaagagatcagttcgataccgaggaacagagacgccagatggttggcattcgccagcaggatcccgcccagcgcggcaattaacaccaacaggtagaactcatccttgttgtcgttatagccttcaagccacgggtaggcgaaagtacaggtggcgaggctcgccaacaataccagcccggtgtaaagcatggcgaaaccatcaacgcgcatcagcggcgtaacgtccatagcgcccgcctggccaacaaaccagagcgaaaccagcgccgcgttaagcccaataaccgagagcgtagcgttgaggaaatgattgcgtcgccacgcaatggagagcatcacaaccaccaccgtcaagccgacgatcagcaacggtagcagtgcgatcaggttttgtggagttattgtcatggcgatttacggccttgtagtagtaacggaattaacaaaccactgctggatattgccaatcgcggagtgcgaggtatccagaatcggctgcggatagaagcccagcagtaccagcagcaccaccagcaacaggatcataaacagctcacgcagcgacatccctggcagttcctggctggcaatctggcttttcgctttaccgaagtaagcgcgatgtaacatcgccagcgaataaacagatgcaaagaccagcccaaaggtagagataacggtaatcaccggtacaacctggaagctgccgaacagaatcataaattcgccgacgaagttaccggtgccaggcatcccaagcgttgccaccgcaaagaacagcgacagtgctggcagccatttcatcttgctccacagaccgcccatcatgcgcatgtcgcgggtatggatacgttcataaagctgaccacaaagaataaacagacccgccgccgacaaaccgtgcgcaatcatctggattaccgcgccctggtaggccaactggctgccggtgtagatagcaatcagcacgaagcccatgtgggaaaccgaggtgtaggcgatcagacgtttgatatcggtctgggcgaaggccatccacgcaccgtagaagatgccgataacacccagccacatagcaattggcgcgaactctgccgacgcgttcgggaacagcggcagggagaaacgcagcaaaccgtaagcggcagttttcagcaagatccccgcgaggtcaacggaaccggcggtcggagcctgggagtgcgcatccggcagccagccatgcagcggaaccaccggcattttgactgcgaaggcgatgaagaagcccagcattaacaggtattccacaccactggacattggcgtattcagcagctcttcatagttgaaggtccagacgccggtcgcattgtagtgaacaaaaaccagcgccaggatggcaatcaacatcaccaggccactcgcctgggtgtaaatgaagaacttggttgccgccgtgatacgcgttttaccgtcagaggctttatgcccccacagtgcgatcaggaagtacatcggcaccagcatcatttcccagaagaagaagaacaggaacatgtcgatggcaaggaacacgccgataacgccgcccaggatccacatcaggttgaggtggaagaagccctgatatttttcgatctctttccacgaacatagtaccgccagcacaccgagcagaccggtcagcacgaccatcagcagcgacagcccgtcaatggcgagatgaatagagataccaaaacgcgggatccacggcatgtcgaattcagactgccactgcggaattccggcggattgcgtcagtgaataaccgccctgcaaccacagttgcagcgacagcgccagcgtcaatcccatggtgatcagcgcgatccagcgtggcaccttgacgccaaagcgttcggtctgccagcacaggaagccgccaataaagggaattaatattagccagggtagtaacatggcgatctttattccttgtaaaagtcccgtcaggaccggattttcaacgaattctcacgacagaaaattctcttcggactgggggtagtgtcggatgcaccgcgaaggcggcttatccgacctacgttcttatatgcccaggggcaatcccacaatccttaactcaacgcagtaccatcaacagtgccagcaccacgaccgcaccgatgctcatggatgccacataccagcgcagatagccgttctcacttaacagcagacctttacctgcaaagcgggaaaggacagccgggatgttcatcattgagttcagcggatcgcgtttcagcaaccaggcaatacccaggaacggcttgacgaacactttgtcatacagccagtcaaatccccaggcgttgtaccaccaggtgcccagcagacggcccggcgcactgttggcgatggaggtcaccagagtacgtttacccagccacagccaggctgccagcagaatgccgaccaccgcgaccacgccagaggtaatttccagggtcaacatgctgccgtgcgccagttccgtcgtttgcggaagcacgccctgcagcggcggtacaatcagtgcgccaacgaaggtggaaaggatcagcagcacaatcagcggcaggctgtgagttacccctttcacggcgtgagcgtgaatttgttcttttccgtggaagacgatgaaaatcatacggaaggtgtagagcgaggtcataaacgcaccgaccagacctgccaccatcagattgatatgaccattcgccatcgcacccgcgaggatctcatccttactgaagaagcccgcagtgaccagcggtagtgccgacagtgctgcgccgcccaccaggaagcagagataaaccagcggaatagatttacgcagaccgcccatcttgaagatgttctgttcgtgatggcaggccagaatgacggaaccggatgccaggaacagcagcgctttaaagaacgcgtgggtcatcaagtggaaaatcgccgcatcccatgcctgcacgccaagcgcgaggaacatgtagccaatctggctcatggtagagtaagcgagaacacgtttgatgtcggtctgtaccagcgcggcaaaaccggccagcagcagcgtaaccgccccgacaatacccaccagatgcagaacttccggcgtcatcaggaacaggccgtgggtacgggcgatcaggtagacacccgcggttaccatggttgcggcgtggatcagcgcggagacaggcgtcgggcccgccatcgcgtcggcaagccatgtctgcaacggcaactgcgcagatttaccgaccgcaccgcccagcagcatcagcgtcgcccacatcagcatgttattgccgtcagcaaagtgcgctggtgccagttccaccatttcgcggaagttcagggtgcccagttcgttgtaaagaatgaacagtgcgaaagcgaggaacacgtcacccacacgggtcacgacgaacgctttcattgccgctgcgccattcttcggatcggtgtaatagaacccgatcagcagataggagcacaggcccacgccttcccagccgaggtacatcagcagcaggttgtcggcaagcaccagaaccaccatgctggcgatgaacaggttggtgtaagcgaagaagcgagagtagccctcttcaccgcgcatataccaggaggcgtacatgtgaataaggaaacccacaccagtgaccaccgagagcatggtcagcgacaggccgtccagcaccaggttaaaaccgatgttaaagtcgcctaccgacatccacgtccacagcggctggctgtatgtctgctcgccgttagcgaagaaatcaacgccgataaaggcggttaccagcgccgccaggcccacagagcctacgccgacgatcgccgagacgttttcagaccagcgcccacgggagaatgccagcaggacgaagccaatcaatggcaaaataatggttaaggcaagcatgttcatccgcgcatctcacttactgaatcgatgttcaggttctggcgacgacggtgaagttgcagcagcagcgcaaggccgatactcgcttctgccgccgcgaggctgatggcgagaatgtacatcacctgaccgtcggtctggccccagtagcttccggcgaccacgaaggccagcgcggaggcgttaatcatgatttccagaccaatcaacataaacagcagattgcgacggataaccagaccggttaagccaagaacgaataagattgccgcgaggatcagtccatgttgtaaggggatcatgcgtgctcctccgtttttcttttcgcgctgtcgtctttacgattgctcagcacttcacccgcacgctcttcacgaccgacgtggaaggccacaaccagacctgcgagcagcagcatagaagccagttccaccgccagtacgtaaggcccgaacagcgtaatacccactgctttagcactgattggcgtaccgtcgataccctgatcgttaacaccgaggatggcgtaaacaatcaccaccagcatgatggccgacaaaattgccggaccaatccacacctgcggtttcagccactggcgttcctgttcgatttctgaaccgcccaggttgagcatcatcaccacgaacacgaacagcaccataatggcacccgcgtagacgataatttccagcgcaccggcgaagtaagcgcccagtgagaagaacaccccggaaatcgccagcagcgaaataatcaggtacagcagtgcgtgtaccggattggtatgggtgatcactcgcaaggtcgcaagtatggctatcaggccacagatataaaaagcgaactccattgcccctctccttacggtaacaggctcttgacgtcgataggcttggcttcgttctctgcttcgcccttatctttgccgtcgattgccatacctgccatccggtagaagttatattccgggtatttgcccggaccggagatcagcagatcctctttctcgtaaaccagatcctggcgcttgtattcccccatttcgaaatccggggttaactgaatcgccgtggtcggacaggcttcttcgcacagaccacagaaaatgcagcgtgagaagttgatgcggaaaaattccgggtaccagcgaccgtctttggtttctgctttttgcagcgagatacagccgaccgggcaggctaccgcgcagaggttacaggctacgcaacgctcttcgccgtccgggtcgcgggtcagaacgatacgaccacgataacggggcggcagatagaccggctcttccgggtacattcgcgtttcgcgtttggcgaacgcgtgcaggccgatcatccagatactacgaacctgggtgccgaaacctactaacaattcttttaaggtcatggtcttattgccccttattgcgcctgccagagaatgacagccgccgttaccagcaagttgatcagcgtcagcggcaggcagattttccagccgaaggacattacctggtcataacgcggacgcggtaacgacgcacgaatcaaaatgaacatcatcataaagaacgcggttttcagcgcgaaccagatgaatggcggtaacaacgggccttgccagccaccgaagaacagcgtcaccatcaatgcagagatggtcacaatcccgatgtactcacccacgaagaacagaccgaacttcataccggaatattcaatgtggtaaccatccgccagttcctgctcggcttccggctggtcaaacgggtgacggtgacataccgccacgcccgcgatggcaaaggtaataaaaccaaagaattgcgggataacgttccacacatgcgcctggctgttgacgatgtcggtcatgttgaatgaaccggcctgcgccaccacgcccatcaaggaaagcccgaggaacacttcgtagctcagggtctgcgcagaagcacgcatcgcacccagcaacgagtatttgttgttacttgaccagcccgcaaacagcaccgcgtaaaccgccagacctgccatcatcaggaagaacaaaatcccgatgttcaggtcggcaaccacccaacccggactgactggcacaatcgcaaaggccagcagcagcgaggtaaaggcaatcatcggtgccagggtaaagatgacgcgatccgagaatttcgggatccagtcttctttaaagaacattttgatcatgtccgcaaccagctggagcgaaccgccccagccaacacggttaggtccgtaacggttctggaacagacccagcaggcgacgttcgccaaagctcatgaatgccccgcaggtgacaaccaccagcaggatcaccaccgctttgaggatggtcagcaggatctcaatcagttccggtgatatccaactcattgttgtgcctccttgagatcctcaagatgcgcgccagccagcaccggagcaatgccggacatacccatcggcaagcccacctgccctgccgtcagtccttcggcgatttcaaccggcagcgtgaccgtgttgccatcgtaactaaaggagacgcgtgtacctgcgttcacacccaacttcgcggcatccgctgggttgagtttgatgtacggctgcggcatacggctctggaagaccggagcacgctgtgacaattcatcgctgccaaacaggtggtaatacggcgcgatacgccatttcccgtcctgcggctggaagcgtgccggtacgctggtgaagtaatccagaccattttcgctggtttcaaacagacgcacgcccggatcgccaaagcgcagtttgccgcccacttcgtcctggaatttgttccacgcctgcggggagttccagcccggcgcccaggcaaacggcacttgcgaacggtgcgcagtcggctggttgttaccttccatcgagaaggtgaacatggtgtcaatatcctgcggctgacgcggctcatgaacgctgatattggcgcgcatggcggtacgaccgctgtaacggtgcggttcacgggccagtttctgcccacgaatacggaatgtcgcatccggcgcagcatctttgatacctgccagttccgggattttcgccacaacagcgtcaatcacatggtcgagctgcgtccagtccacttcacggctcagcagggtgctgtgcagcgagtgtaaccagcgccagctttccagcatgacagttttgctgtcgtaataagcaggatcgtaaacctggaagaaacgttgggcgcggccttcgttgttgatcaccgtaccgtcgctttcagcaaagctggcagcagaaagtaccagatgggcgttttccataatcgctgtgcgttgatgatcaaccaccatcaccagcggtgctttagccagcgcagcattcacgcggatagcagaagcgtgacgatgcagatcgttttccaacaccaccaccgcgtcggcgcgtccggtttccagttcggttaacgcttcttcaagcgaaccgccacccataatgcccagccccatgctgttgacggaacgggcaatcatggtgataccgacgtcagcgccgcgacctttcagggctttcgcgacgttagccgccgcctgaatcacctctaagctaccggcgttcgtcccggagataatcaacggtttcttcgcacctgccagtgcctgcacgatgacgtcgattttgctttgcagctcaggttcgataccgtcaaccgctggtgcagagttatccagcgcatgggcgatggcaaaacctaaacgcgcctgatcttcaaccggtgcgcggtaagtccacgccgcgatatcatccagacgggtgtcatcaacgttggtaacaaacagcggatgcttcgcacgttgaccgatgttgaggattgccgcaatctgccagtcagccactttctgtgctgccgccatttcgcgcgctttacctttcacagcctgacgcactgccagcgcgacgcgcgcgccggtctgggtaacgtcttcgcccagcaccagtaccgcatcgtaagattcgatttcgcgcagagccggagtataaatgccgccttcacgcagcactttcagcgccagttgcagacgttcctgctcaccgtgagcgataccggtgtagaagttttcttcgcccaccagttcacgcagcgcaaagttgctttccacgctggcacgcggagaaccaataccgatcactttcttcgactgacgcagaatatctgccgcgccctgcattgcctgttcggcgttgagggtaatgaaatcatcgccacgacgctgtactggctgacgcggacgatccttcaggttgacgtaaccgtaaccgaaacgaccacggtcgcagaggaagtagtggtttaccgtaccgttgtaacggttttcgatacgacgcagttcgccgtaacgttcaccggggctgatgttacagccgatggaacattgctggcagatgctcggcgcaaactgcatatcccatttacggttgtaacgctcggagtgcgttttgtcggtaaatacgccggtcgggcaaatttcgaccaggttaccggaaaattcgctttccagcgtgccgtcttccgggcgaccgaagtagacgttgtcgtgcgcaccgtaaacgcccagatctgtaccgtcagcgtaatctttgtagtaacgcacacagcggtagcaggcgatgcagcggttcatttcgtgagagatgaatggccccaaatcctgattacggtgggtacgtttggtgaaacggtagcgacggaagctgtgtccggtcatcacagtcatatcctgaagatggcagttaccgccctcttcacataccggacagtcgtgcgggtggttggtcatcaaccactcgaccacgctttcacggaactgtttcgcttcttcgtcgtcaatggaaataaaggtgccatcggaagccggtgtcatacaggacatcaccaggcgaccacgcgtgtcttccgcgttttggtattgcttcaccgcacactggcggcaagcaccgacacttcccagcgccggatgccagcaaaagtaaggaatatcaaggcccagagacagacaagcttccagcaggttgtccgctccgttgacctcgtattctttgccgtctacatgaattgtagccattagcatgcttccagttttctcagtcagagactgagcgttaatcgaaattcggttaccagcgctctttcagcaggttcggctgaatcccattaatcaaatgggtattgctgaacggctgtttgattcccgcctcaaattcttcgcggaaatatttgatggcgctctgtaacggctccactgcaccaggtgcgtgggcacagaaagttttacccgggcctaagaatcgacacagttgctcaagtgtttcgatatcgcccggctgaccttcaccacgctccagcgcacgcagaattttcacgctccacggcagaccgtcgcggcacggcgtacaccagccgcaggactcacgggcgaaaaactcttccaggttacgcaccagcgacaccatgttgatctcatggtcaaccgccatcgccagcgccgtacccagacggctgcccgctttaccgatactttcgaattccatcggcagatcaaggtgcgcttcggtcaggaagtcagtccccgcgccgcctggctgccaggctttaaatttcagaccatcacgcataccaccggcgtaatcttcgaggatctcgcgtgcggtggtgccgaacggcagttcccacagtcccggatttttcacccgaccggagaagcccatcagcttggtgccagcatctttacttttcgagatgttctgataccactccacgccgttagcgaggatcgccggaacgttacacagggtttcgacgttgttgacacaggtcggtttaccccatgcgccggaggttgccgggaagggtggcttcgagcgtgggttagcacgacgtccttccagggagttgattaacgctgtttcttccccgcagatgtagcgccctgccccggtatggacgaacagttcgaaatcgaaacctgttcccataatgtttttgccaagcagacccgcttcggtggcttcggcaatggcacggcgcagattaactgccgcttcgatatattcgccacgcaggaagatgtagccacggtaagctttcagcgcaaacgcggagatgagcataccttccaccagcaggtgcggcagttgctccatcaacaggcggtctttataggtgcccggctccatttcatcggcattacacagcaggtaacggatgttcatggattcgtctttcggcatcaggctccatttcaggccagtcgagaagcccgcgccgccgcgccctttcagaccagcgtcttttacctgattaacgatttcgtccggagacagcccggtcagcgccttacgcgcgccttcgtaaccgtttttgctgcggtattcgtccagccacactggctgtttgtcatcgcgcagacgccaggtcagcggatgcgtttcgggagtacggataatgtttttcatttataccgctccagcagttcagggatcgcttccggggtcagatgcgcgtgagtgtcctcatcgatcatcatgtttggccctttatcacagttccccaggcagcaagttggcagcagcgtaaagcggccatcaaatgtcgtttgccctggtttgatgttcagctttttctcgagcgccgcctgaataccctgataaccgttgatatgacagaccacgctgtcacaataacggatcacatggcgaccaaccggctggcggaagatctgactgtagaacgttgccacaccttcgacgtcgcttgccggaatacccagcacatcggcgatcgcgtggatcgcaccatccggcacccagccacgctgcttctgaacgattttcagcgcttcaatggacgccgcacgcgggtcttcgtagtggtgcatctcgtgctcgatcgcttcacgctctgccgcactcagctcaaaagcctcggtttgtggttgttgattctcgtgcataattagcggtccacatctgacataacaaaatcgatactgcccagataaacaatcaggtcagacaccaggctgccgcggatcgccgccggaatttgctgcaaatgcgcaaagctcggggtacgaacacgggtgcggtaactcatggtgctgccgtcgctggtcaggtagtaactgttgatccctttggtcgcctcaatcatctggaaagattcattggcaggcatcaccggaccccacgacacttgcaggaagtgggtgatcagggtttcgatatgttgcagcgtgcgctctttcggcggcggcgtggtcagcgggtgatccgctttgaacgggccttccggcatgttgttgaggcactgctcaagaatgcgcagactctggcgcagctcttccactttaagcattacgcgggtgtagcagtcagaaacgccaccacccaccgggatttcaaagtcgaagttttcatagccagaataaggacgcgccttacgcacgtcgaagtcgatcccggtagcacgcaggcccgcgccagtggtgccccactccagcgcctctttcgcgccataggcggcaacgccctgggaacgacctttcagaatggtgttttgcagcgccgctttctcgtaagacgccagacgtttcggcatccagtcgaggaactcacgcagcaggcgatcccagccgcgcggcaggtcgtgcgctacgccgccaatacggaaccacgccgggtgcatacggaaaccagtgattgcttccaccagatcgtaaattttctgacgatcggtaaaggcgaagaacactggcgtcattgcgccgacgtcctgaataaaggtcgagatatacagcaggtgactgttgatgcggaacagttcggagagcataacgcgaatgacgttaacgcgatccggcacggtgatcccggccagtttctctaccgccagcacgtaaggcatttcgttaacgcagccgccgaggtattcgatacggtcagtatacggaatgtagctgtgccaggactggcgttcgcccattttctccgcaccacggtggtggtaaccgatgtctggtacgcagtcgacaatctcttcgccatcgagttgcaaaacgatacggaaagccccgtgcgccgacgggtggttcggaccgaggttgaggaacatgaagtcctcgttttcggtgccgcgcttcatcccccactcttccggtttgaaggtcagggcttccatctccagatcctgtttggctttggtcagctcaaacggcgagaattcggtagcgcgcgccggataatctttacgcagcgggtgacctttccaggtttgcggcatcatgatgcgtcgcaggttcgggtgaccgtcgaaagtaatgccaaacagatcccaggtttcacgctcataccagttagcgttcgggaacagtttggtgaaggtcggtacgtgcaggtcgttttctgccagcgccaccttcagcatgatgtcgcggttacgatcgatagaaatcagatggtagaaaacggaaaaatccgcggcaggtaacccttcgcggtgtgtgcgcagacgttcgtccatgccgtgtaagtcaaacagcatgacgtaaggtttcggcagtttctttaagaaatcgccaacttccagtaattgttcacgcttgatccacacaacgggaaccccggtgcgagtcgcctgaacagtaaaggcatccggcccaaaacggttgcgcagttcgccaatcaccggatcatcaagatgatcgcgggtctgccaggcgggttcttgcgcggttaagtcggtcatattgttcaccattgcaaatggtccgtggtgactgtcggcgcagtaagcttcgcgaaatagatttaggaataagcgaagaaaaatccctttgccgacaggcgcaaattaaatctcgtcaggtgtacgcaggttagttacggcaatgcgttcaccgcgcttgcgttcgcgctctgattgcatattggcgcgataaacgccctgatcgccaaccacccaggagagcggacgacgttctttgccgatagattcctgcaacagcatcagtgcctgcatgtacgcttcaggacgcggcgggcagcccgggatatacacatcaaccgggatgaatttatcgacgccctgcacaacggaataaatatcgtacataccaccagagttggcacaggcacccattgagataacccattttggttccagcatctggtcatacagacgctgaataaccggtgccattttggtaaagcaggttcctgcaaccaccatcaggtcagcctgacgcggcgaagcacgcaatacttctgcgccaaaacgcgccacgtcatgcaccgcggtaaacgaagtcaccatctcaacgtaacagcaggaaagaccgaagttatacggccaaattgagtttttacgaccccagttaaccatgtcattgagcttgcccataaacacgtttttgttaacttcttgctccagagggtcggttacgatctcctgcttttgcagggggtaacggtcgttctcaccgttgggatctatgcgggtgagcgtataatccatcttaatgcctcgcggttagcgttgacgattagcgatactgttcgtttccgggttcatacgctcgcggcgtgaacgcgcgggcgtccagtccagcgcgccaatacgcaccagataaaccagacctgccagtaacacaaaaataaaaattgcagcttccacaaagcctacccagccgctttcgcggatagaggttgaccatgcgaacagatacagcgcttcaacgtcgaagataacgaagaacatggccaccagataaaacttggcggacaggcgtaagcgggcggagccgaccgagtcgataccggattcaaacggcacgtttttcgacctcgcgcgtgcgcgaccgcctaaaaaccaaccgcctaccagcatcaggcaacacaggccaatggcaacgataagaaagatagcgaatgcccagtgatgagcgatgacttcagtggatgttgacatactcattgcttactcatcaaaagtagcgccagattcactgctcttcacggcagatggacgccacatcgattcatggggaggaataaaaaaaaccttacaatcactgtagaaattcttttatacagctaattgatgtggttttttactcctttctataaccttttgtcaactttaacaaaagtttcttcacattagtttacataatatcaacaccattagcatttaatgccctttcaccccagatccttgacgactccaggataattagatgttgttgaatcgtgtccgttgtgaagcaatggaaaaaatacgggtctattttgacaggaatttgtgtcgattcctccccccaaaagagagtattttcttgatctgtgacacgcttttgtcattccataacaaaaacgcagcaacaaatttacgtattttttaacatcattgtagcaggtgatttttttcaggcgattatttgtgcgttcgggacgtgaatctctggtggttgaaaaatgaacagttttgtacgttctgcactatgcgatgaaggatttttactaaaaaaaagccgctggggtttaaaacacccccagcggctcgttttttacactattgtctcaggaattatctatcgtccgtcgattactcgatatccctttcaatcaacaatgaatcatccccttccggagcagacattgggctgtattgccacggattatggtagctctccatcgcctgatagatcacctgggccagctcattattactggacggatcatagcacagcaaatattcggtatcaggtagcggcggtaagccatctactccactcagcacacgcaggtccgggctcatcatctcaaccggccttgccgtcacgccaagaccggctttcactgccgcacgaacggccggaagcgtcgaggcgacataagccagtcgccatggaatatctgctttattaagcgtcgccagcaccatatcgcgaaacgggctaggatcatccagcaatacaagagggatcggctcgcctttttgcaatatgtattccgctgcgcagtaccagtgtgttggcgaggtacgcaggttcaatgccttaaacgctgaaggacgatgggtggttaccatcaaatccacttcctgggattccagcatttctgccatataggcattacgtttaacgcggacatccagcgcgaatttcggataaaccgaactcacgcgatttaacaggaaaggtaagatcgtatcggcagattcatctgaagcaccgatagttaatacgccctgaagattactgaacattaatgatgagcaggcctcatcattaaaacgcaggattttcctggcgtaaccaagaagttgaatgccatgttcagttaacagtttgttgcgaccgtgacgagcgaacagttctttcccaacgagttgttccagacgctgcatttgctgacttacggcggactgagtacgacacacagcggcagctgcggcagcaaaagtgttcagatcggcaacagcaacaaatgttctcagcagatcgaggtcgaggttaattatcggacgatttgcacttatcatatattatcacttactggcggctcatactgagctggttaatgctgtgcacacacaaacaagcaattccatttgtaatgtgcctccctggcagtttcatccggaacccggacgaaagtaaaaatgcatatgagttgcactaaaaaagcgactcacattgttccgttataatgcctgaagtagatcacagaatatatcttcagggatcgcatatctattaagttactcactcttttctatttatgacatgcgcgtgtttgtataaatgtaaatgtgagtccttgttccactctcgtgcagcatcgctggtcatacgcgaacacgtaccaacagcaatggtgaggcggcatcaagagcagggatccgtcatttatccgagcattttaccccaaaaaccttttatttataagggtcattgcgaattatctgatgcaaagttatgttatgttaggcaaagtaatcttctattattaataagcacatcaaaacctttttgaatattaaataataattaattagcatcatcctcattcattaattccgcttaacaatagtttcacaccttgcccccattgcgacacctcggaaatcatcacgcagttaaactctccgtaatgaggaaatatcatcatcgcgtttcattagtgaattcttaaatgaggcattttcacacaattatcttacagataaaaaaaccagacttacaattaagaatcagaacaattcactatataacattgcatgtaaagcatatacacctcattattttgtcattattaagttattaacagcacaatcgagccttcccctctggcaaaatcttattctgcagaccttcaaaacaccgtcctgggggagtacattgttctaagctgacttccacggcagggagtggcgataacagcaaaaaaggtcaagattcatgtcccccattgaaaaatccagcaaattagagaatgtctgttatgacatccgtggtccggtgctgaaagaagcaaaacgcctggaagaagaaggtaacaaggtactgaaactgaacatcggcaacccagccccgttcggttttgacgcgccagatgaaatcctcgttgacgtgatacgcaacctgcctaccgctcaagggtattgcgattccaaaggtctttactccgcgcgtaaagccatcatgcagcactaccaggctcgtggcatgcgtgatgttaccgtggaagatatttacatcggcaatggtgtatcggagcttatcgttcaggcaatgcaggcattgctgaacagcggggacgaaatgttggttcctgcaccagattacccactctggaccgcggcggtttcgctttccagcggtaaagcggtgcattatctttgcgatgaatcctctgactggttcccggacctcgatgatattcgcgctaaaattacgcctcgtacgcgtgggatcgttattatcaacccaaataacccaaccggcgcggtatattccaaagagcttttaatggagattgtggagattgcacgtcagcataatctcattatcttcgccgatgaaatttatgacaaaattctctacgacgacgctgagcatcactcaattgcgccgctggcacctgacctgctgaccattacctttaacggactgtcgaaaacgtaccgcgttgcaggcttccgtcaggggtggatggtgttgaacgggccgaaaaaacacgccaaaggctacatcgaaggtctggaaatgctggcttcaatgcgcctgtgtgctaacgttcctgcgcaacacgccattcagaccgcgctaggtggttatcagagcatcagtgaatttattacccctggcggtcgtctttatgagcagcgtaaccgcgcgtgggaactgatcaacgatattccgggcgtttcctgcgtgaaacctcgtggtgcgctgtatatgttcccgaaaatcgacgccaaacgctttaacattcacgacgatcagaaaatggtgctggatttcctgttgcaggaaaaagttctgttggtgcaagggacggcattcaactggccgtggccggatcacttccgcattgtcacgctaccgcgtgtcgatgatatcgagctgtctttgagcaagttcgcgcgtttcctttctggttatcatcagctgtaatcttaatttcactgccggagattgcatccggcagcgttatcccgccacaatgacctgatgatgtcatcatacgtaaggtcactatgaaacagagccatttttttgcccatctctcccgcctgaaactcattaaccgctggccgctcatgcgcaacgtgcggacggaaaatgtgtccgaacacagtttgcaggtagcgatggtcgcccatgcgctggcagctatcaaaaatcgaaaatttggcggtaatgtcaacgccgaacgtatcgctttactggcgatgtaccacgatgcctcagaagtgctcaccggcgatctccctactccggtgaaatacttcaattcgcaaatcgctcaggagtacaaggctattgaaaaaatcgctcagcaaaaactggtcgatatggttccggaagagctgcgggatatctttgcgccgttaattgacgagcatgcatatagcgatgaagaaaaatcgctggtgaaacaggcagatgcactgtgtgcatatctgaaatgtctggaagaactcgcggccggaaataatgaattcttgctggcaaaaacgcgactggaagcgacgcttgaagcgcgtcgcagccaggagatggactacttcatggaaatatttgttcccagcttccatctttcgctcgatgagattagccaggattcaccgctgtaagcagccggagtctgcgtcgcatcaggcaataagcgccggatgcgacatcaggctcttgtcaaaacggaaacagcatcgggatcatcaccacacaaaccgccatcacgataatggtgaacggtacccccaacttcacaaagtcactgaagctgtaatttcccggacctaaaaccagtgtgttaacaggtgaagaaaccggtgtcataaaggcggcggatgctgccatcgccacgaccatcgcgaatggataaggcgacacccccatcgttttggcagcagccagcgcaatcggagccatcaacaccgccgtcgcggtattagagataaatagcccaataaccgccgacaagacaaacaaacaccccagcatcatatgtggcccgtaaccaccgccaatgtccatcagccctttcaccgccagcgcgacacctcccgttttctgtaatgccacagcaaacggcatcatcccaacgatcaaaataatgctcggccagtgaatggatttataggcgctttcagcatctatacagcggaatttccccatcagcaggcaggcgatgatagcggcaacaggattaggaatttcatctgtcagcattaacgccaccattagcaccagacagaaaatggcatggggtgcctggctgtgcgcgggtgatgcttcactcacctcttccggtaagttcagcgctacgaagtcgcggccctgtttggccagcataccgatcagtttccagttacccacaaccaggatgatatcgcccagcagcagaggctcatccgccagcgaaccttccagcgccacgccattgcgctttagccccaccacattcagtccgtagcgggtacgaaaaccaatttcgcgcaccgatttaccaatcagttctgactcaggaattaatgaaatctctgccatgcccacatcaagggcctggtcagaaaaatactcgccgcgcagtaccatcggctccagcaattgctcactacaaaattgccggagatcgacatcagccgcagacatatcaataagcaaaacgtcacgcgcgcgaaattcagaaaccccattaacgttcacgataacgcgacgaaaacgccgccagcgttcaacaccgatgacgttagcgccataacgctcacgtaatttgagatcatccagccgttgaccaatcattggcgatccggggcgaatagccagacgtcgcgcacgcccggtcagtcgatattcacggataagatcgcgaaaggttcgacgcgtccagccttcgcgctgcggggtctgggtatcccctttcagcatgaaacgcatcactaacatatacaaaatacccagcaccagcacgaccaggccaataggtgttacgctaaagaaactgaagccgtgatagccttcacgcagcaattcactgttgactaccaggttcggcggcgtcgccaccagcgtcatcatgccgctaatcagcccggcaaaacttaacggcatcatcagacgtgacggcgacgtttgcatacgcatggcaacgcttaacaccacgggaataaagatagcgacaacgccggttgaactcataaacgcgccaagccccgcgacggtcagcatcaacaaaaccaacattttgatttcactattgcccgcaactttgaccagccatgttcccattacggtggcaacaccggtacggaccaaaccatcgccaataataaacaaggcggcaatcaggacaacgttaggatcagaaaagccggaaaatacttctgggactgtcagcgttccgcttaatgcaaacgcgacaataacaaacaaagcgaccgcatccatacgcactctgcccgtcgcaaacaagacgatggcaacggccagtaatgaaagaacccaaatcaattcaccgttcacaacttatccttgttaattgagggggatgacttgattctgccataaaaaagccccgacgagacggggctaaatcatgatcaggtgtttcactgaataataacatcgccatttggctgtttggtcacagtaatttgctccagactgtggaggaccaaatcgacctcattcaggcgcggggtatctgccggagcgttaaccgcaatgacatgacaacccgccgccaggccagaaagcacgccagcgggagcatcttccaccaccacacactcctgcggcgcaagccccagcagctgcgcgcctaacagatacgcatcaggttctggttttccgcgcttcactcgctcagcggttacaaacacctctggtgcgggaagcccagctattttatggcgcgctcgcgctaccggcatggagccagaagtcacaatggcccacggaatacctgctttattcaaatgactgagtaaggcgattgcccccggaagcgcggtaataccttcggtttccgtggcctcgatgtgctccagacgcgtaaactcggcggcaatatcagcctcggatttgcccgccataaaatggcgcagagaggtgatcgcctgtttaccgtgaatgaaagccagcacctcttccggcgctaacccatgacgtctggcccagttgctccacgcccgttctaccgcaggcagggaatccaccagcgttccatcaagatcaaacagaaaacctttgcaccgcacgcgggcctcctcaggcattgataatttgattaatttcgttggcgctcaaatggtactgacgcgggcaggcatgccacacattaagcatgcgctgatatttttcccacattggcgtctgggcgttaaaaccgtgagttccggcgtcaaaatgggtatagcgcccttccacattaaccataaagcggacataaccgaggtaacgtgcttcagtggcggcgtcaaagccgaggaaggtgacacgacgttcatcgatggattgctggtcctgcaaattagaccaggaaacatgcaacgcatgatacatctccataatgtcgatgatagtgcggcaggtttcttctttcagctcgccaaactcgcgatccaattcacgcatctgtaatccgtaaccacgctcaataattgtttgcaggcgacggtaacgttcagcatttgccggatcgagcatagtcatcatcttgtactgattagacaaaataagacgttgcgcgttggtcatttccattgttgactcctgtatcactctactacggtgaaaaaaaagaaggctgagtatgccttcttttatatgcgtaatcaggggtcaattacaaatcatcaaggaaagttttatccagttgtttgaaggcgcgcttaagcgtgtcagctaatgcctggtaatcaggcttgccttcaacgggtgccaacacctgtccagactcctgcaatttaccgcgaacttcataaaaccagttaaggattgcagggggtaatggcgtgacagaacgcttgcccagccaccacaatccctgcatgggtaaacttaaggcgaacagggcagtggcaactgccggcccaagctgaccgcccagggcaatctgccagcagagagtaaatacggcgatcggcggcataaaacggatcgcataacgcgtcatcttgataacgcgattttcgacaaagaccggggcaaggcgtttttccagcggccacgtctttgagtaatgctgtccccggcgaaacaagctaaaaaaattaacagaacgattatccggcgttgacatgcttcacctcaacttcacatataaagattcaaaaatttgtgcaaattcacaactcagcgggacaacgttcaaaacattttgtcttccatacccactatcaggtatcctttagcagcctgaaggcctaagtagtacatattcattgagtcgtcaaattcatatacattatgccattggctgaaaattacgcaaaatggcatagactcaagatatttcttccatcatgcaaaaaaaatttgcagtgcatgatgttaatcataaatgtcggtgtcatcatgcgctacgctctatggctccctgacgtttttttagccacgtatcaattataggtacttccatgtcgagtaagttagtactggttctgaactgcggtagttcttcactgaaatttgccatcatcgatgcagtaaatggtgaagagtacctttctggtttagccgaatgtttccacctgcccgaagcacgtatcaaatggaaaatggacggcaataaacaggaagcggctttaggtgcaggcgccgctcacagcgaagcgctcaactttatcgttaatactattctggcacaaaaaccagaactgtctgcgcagctgactgctatcggtcaccgtatcgtacacggcggcgaaaagtataccagctccgtagtgatcgatgagtctgttattcagggtatcaaagatgcagcttcttttgcaccgctgcacaacccggctcacctgatcggtatcgaagaagctctgaaatctttcccacagctgaaagacaaaaacgttgctgtatttgacaccgcgttccaccagactatgccggaagagtcttacctctacgccctgccttacaacctgtacaaagagcacggcatccgtcgttacggcgcgcacggcaccagccacttctatgtaacccaggaagcggcaaaaatgctgaacaaaccggtagaagaactgaacatcatcacctgccacctgggcaacggtggttccgtttctgctatccgcaacggtaaatgcgttgacacctctatgggcctgaccccgctggaaggtctggtcatgggtacccgttctggtgatatcgatccggcgatcatcttccacctgcacgacaccctgggcatgagcgttgacgcaatcaacaaactgctgaccaaagagtctggcctgctgggtctgaccgaagtgaccagcgactgccgctatgttgaagacaactacgcgacgaaagaagacgcgaagcgcgcaatggacgtttactgccaccgcctggcgaaatacatcggtgcctacactgcgctgatggatggtcgtctggacgctgttgtattcactggtggtatcggtgaaaatgccgcaatggttcgtgaactgtctctgggcaaactgggcgtgctgggctttgaagttgatcatgaacgcaacctggctgcacgtttcggcaaatctggtttcatcaacaaagaaggtacccgtcctgcggtggttatcccaaccaacgaagaactggttatcgcgcaagacgcgagccgcctgactgcctgatttcacaccgccagctcagctggcggtgctgttttgtaacccgccaaatcggcggtaacgaaagaggataaaccgtgtcccgtattattatgctgatccctaccggaaccagcgtcggtctgaccagcgtcagccttggcgtgatccgtgcaatggaacgcaaaggcgttcgtctgagcgttttcaaacctatcgctcagccgcgtaccggtggcgatgcgcccgatcagactacgactatcgtgcgtgcgaactcttccaccacgacggccgctgaaccgctgaaaatgagctacgttgaaggtctgctttccagcaatcagaaagatgtgctgatggaagagatcgtcgcaaactaccacgctaacaccaaagacgctgaagtcgttctggttgaaggtctggtcccgacacgtaagcaccagtttgcccagtctctgaactacgaaatcgctaaaacgctgaatgcggaaatcgtcttcgttatgtctcagggcactgacaccccggaacagctgaaagagcgtatcgaactgacccgcaacagcttcggcggtgccaaaaacaccaacatcaccggcgttatcgttaacaaactgaacgcaccggttgatgaacagggtcgtactcgcccggatctgtccgagattttcgacgactcttccaaagctaaagtaaacaatgttgatccggcgaagctgcaagaatccagcccgctgccggttctcggcgctgtgccgtggagctttgacctgatcgcgactcgtgcgatcgatatggctcgccacctgaatgcgaccatcatcaacgaaggcgacatcaatactcgccgcgttaaatccgtcactttctgcgcacgcagcattccgcacatgctggagcacttccgtgccggttctctgctggtgacttccgcagaccgtcctgacgtgctggtggccgcttgcctggcagccatgaacggcgtagaaatcggtgccctgctgctgactggcggttacgaaatggacgcgcgcatttctaaactgtgcgaacgtgctttcgctaccggcctgccggtatttatggtgaacaccaacacctggcagacctctctgagcctgcagagcttcaacctggaagttccggttgacgatcacgaacgtatcgagaaagttcaggaatacgttgctaactacatcaacgctgactggatcgaatctctgactgccacttctgagcgcagccgtcgtctgtctccgcctgcgttccgttatcagctgactgaacttgcgcgcaaagcgggcaaacgtatcgtactgccggaaggtgacgaaccgcgtaccgttaaagcagccgctatctgtgctgaacgtggtatcgcaacttgcgtactgctgggtaatccggcagagatcaaccgtgttgcagcgtctcagggtgtagaactgggtgcagggattgaaatcgttgatccagaagtggttcgcgaaagctatgttggtagtctggtcgaactgcgtaagaacaaaggcatgaccgaaaccgttgcccgcgaacagctggaagacaacgtggtgctcggtacgctgatgctggaacaggatgaagttgatggtctggtttccggtgctgttcacactaccgcaaacaccatccgtccgccgctgcagctgatcaaaactgcaccgggcagctccctggtatcttccgtgttcttcatgctgctgccggaacaggtttacgtttacggtgactgtgcgatcaacccggatccgaccgctgaacagctggcagaaatcgcgattcagtccgctgattccgctgcggccttcggtatcgaaccgcgcgttgctatgctctcctactccaccggtacttctggtgcaggtagcgacgtagaaaaagttcgcgaagcaactcgtctggcgcaggaaaaacgtcctgacctgatgatcgacggtccgctgcagtacgacgctgcggtaatggctgacgttgcgaaatccaaagcgccgaactctccggttgcaggtcgcgctaccgtgttcatcttcccggatctgaacaccggtaacaccacctacaaagcggtacagcgttctgccgacctgatctccatcgggccgatgctgcagggtatgcgcaagccggttaacgacctgtcccgtggcgcactggttgacgatatcgtctacaccatcgcgctgactgcgattcagtctgcacagcagcagtaatctcgtcatcatccgcagctttgcgctgcggatatctgaaccggaaataatcactatttccggttttttattctcttaatttgcattaatcctttctgattatcttgcttaactgcgctgcatcaatgaattgcgccatcccactttgcatacttaccactttgttttgtgcaagggaatatttgcgctatgtccgcaatcactgaatccaaaccaacaagaagatgggcaatgcccgatacgttggtgattatcttttttgttgctattttaaccagccttgccacctgggtagttccggtggggatgtttgacagtcaggaagtgcagtatcaggttgatggtcaaacaaaaacacgcaaagtcgtagatccacactcatttcgcattctgactaacgaagcaggcgaacctgagtatcaccgcgtacagctgttcacgacgggcgatgaacgcccgggcctgatgaacttcccgtttgaaggattaacctcaggatcgaaatacgggacagccgttggcatcatcatgtttatgctggtgattggcggcgcgtttggcattgtgatgcgtacaggaaccattgataacggtatcctggcgcttattcgccatacccgcgggaatgaaattctctttattcctgcgctgtttattctgttttcacttggcggcgcggtatttggtatgggagaagaggccgtcgcctttgccattatcatcgcaccgctaatggtccggctgggctatgacagtattaccaccgtcctggtgacctatattgccacgcaaatcggttttgccagttcgtggatgaacccgttttgtgtggtcgttgctcaggggattgccggcgttccggtgctttctggctccgggttgcgcatcgtggtgtgggttatcgccactctgattggcctgatctttaccatggtgtacgcctcacgagtgaaaaagaatcctcttctgtcacgcgtgcatgagtccgaccgcttctttcgtgaaaagcaggctgatgttgaacaacgtccgtttacctttggtgactggctggtattgattgtcctgaccgccgtaatggtctgggtgatttggggcgtgatcgttaatgcctggtttattccagaaattgccagccagttcttcaccatgggtctggtgattggcatcatcggcgttgttttccgccttaacggcatgacggttaataccatggcttcatcctttaccgaaggggcgcgaatgatgatcgcccctgccctgctggtgggtttcgccaaagggattttgctgctggtcggtaatggtgaagcgggtgatgccagcgtgttaaataccatcctcaacagcattgccaatgccattagcggtctggacaacgcggtcgcggcctggtttatgttgctcttccaggcggtatttaatttcttcgtgacgtccggttctggtcaggcggcgttaaccatgccgttactggcaccgcttggcgatctggtcggtgttaaccgtcaggttaccgtgctggcgttccagtttggtgatggcttcagtcacatcatttacccaacctcagcgtcgttaatggcaacgctcggtgtgtgcagggtggacttccgtaactggctgaaggtgggcgcgaccctacttggactgctgtttattatgtccagcgtcgtagtgatcggcgctcagttgatgggctaccactaaaaatgttaagagccgcaattgcggctcttttttcattctgccgtttcagtctctacggcttcatttttggcattgcgcttcatccacaacgctagcgctttcagcgagtctggagtgaactcatcgcagcgtgcggtgatttcttccggcgtcagccagcaaacttcactgacttcatcttcctgtagtgcgaagggaccgtgagagacgcagctgaacaatgcgccccagacacggcaatttttatcttcgaaatagaactgcccgtgctcggcaaaggggacaccggcaatgcccaactcttcttccgcttcgcgacgcgcggattccagcagttgctcatcggcctggactacaccgcctgcggtcgcatctaacatgccgggtaaaaagtcttttgtctcggtacgacgctggaccagaattttgcccatgccatcatgcacgacgatgtaagttgcacgatgacgcagacactgtgcccgcatttgttcccggctggcttgtgcaatgacttcgttctcttcattgacaatatccacccattcagtacttgccaaacgacgctgttccattatcaggaaaccttctttttctggcgctcttacggcgcattttgagttgtgggtaaattacggattaatcgcgacctgcgcaatgatactttgatcattgagtgcgattacactaagtacgtcattatccagcatgccataactcgccggattaccgcctttcggaatactcaccgagccggggttgaagtggaaaatctccccccgctgttctgccactggcagatgggtatgaccgtacaccagcacatcgttctggtttaaagcaggcagattttccgggccaaaaagatgaccatgcgtcaaaaacagacgttgtttttccagtaatacctgttgccacggcgcggttatcgggaaatgcagcagcatttgatccacttcgctgtcgcagttgccgcgcacagcgataaccttatgtgccacttcattaagccgttcagcgactttggctggcgcgtaaccctccggtaaagcattacgcgggccgtgattcaacacgtcgccaaggatcaccagccactgggcaccgctttgggcaaacaactccagaacacgttccgtcgccggtaacgacccatgaatgtccgatgcaaacatcagtttcatcactcactcctcgtcgaaaaaacgtaagctatgatactggattctgtcgttgctatcagccagattgcttcgccgaaagtgcaataaaacgctggacagacgctcgctgccactggaatgttgcataatccaccaggcgttctggcacctcatcgccatgtagtaccaggcggttaatcattagcgccagatcagtatcagcaatgcaccattcaccaaataaattcggctgacccagtactaacaaatgttctgccatcgcgaacagtttctctgcactggcttttccctcggccgttagtggcgcttttttcgcccccgcaaagacaacatccgtcggacgctcttcgcggatgggcatcagatcgctgcgcagccaggcctgaatctgtcgtgcacgcgcacgattttctaaatcaagcggataaatacgttcccaggtcggtggcgcaaatcgatcttccagatactccgcaatggcagaagattcactcaactcaaaatcatcgatttgtaataacggcacacggcgtgtctgaccgtaaccttgccacgtcggctgcaaatgttcaccgctgtcgaggtcgatggtcttgatatgaaacgacaggcctttttcctgcaacgccacccaggcggataacacataaggggagaaaaagtgggcatctgaccaaagcgtgatagcgggtttactcattatgtcctcggcaataaagggggctggctatcaaactatagagcctttttgtcactgtcacgtgacgaatactcacgtaagtcgccgcgctttctatacttgtggtgttcagatgattaaacaaccggagctgcaatgatcgatctctatttcgccccgacacccaatggtcacaaaattacgctgtttctcgaagaagcagagctggattatcgcttgattaaggtagacctggggaaaggcggtcagtttcgtccggaatttttgcgcatttcgcccaacaacaaaattccggcaattgttgatcattctcctgccgatggcggcgaaccgctaagcctctttgagtctggtgccattttgttgtatctggctgagaaaacaggactctttttgagtcatgaaacgcgtgagcgcgccgccacattacagtggttattctggcaggtaggcggactggggccgatgcttgggcaaaatcatcattttaatcacgcagccccccaaaccattccttacgctattgaacgttatcaggttgaaactcagcgtctttaccatgtactgaacaagcggctggaaaactcgccctggctgggaggcgagaactacagcattgcggatattgcctgctggccgtgggttaatgcctggactcgccagcgaattgacctagcaatgtatccggcagtcaagaactggcatgagcggatccgttcgcgccctgccaccgggcaggcactgctaaaagcacaactcggtgatgagcgttcggatagttaacagaaacaggttctcgtgtattatttcatcctaagtaaaacaacggagaacctgcaatggcacaacctgccgctattattcgtataaagaaccttcgtttgcgtacgtttatcggaattaaggaagaagaaattaacaaccgtcaggatattgttatcaatgtgacgatccactaccccgccgataaagcgcgcactagcgaagatatcaacgatgcgctgaattatcgcaccgtaacgaaaaacattattcagcatgtagagaataaccgtttctctttgctggaaaaattaactcaggatgtgctcgatatcgcacgtgaacatcactgggtgacgtatgctgaagtggagatcgataaactgcacgcgctgcgctacgccgattcggtatccatgaccttaagctggcagcgttaatcgccatatcgggaggctgcatgaacatagtgatcaccggagggacaggattaattggtcgccatttgattccgcgtttgctggagctgggccatcaaattacggtagtgacgcgtaacccgcagaaagccagttccgttctcggccctcgggtgacactatggcaagggcttgccgatcaaagcaacctcaacggcgttgatgcggtaatcaacctggccggagaaccgattgctgataaacgctggactcacgagcaaaaagagcgtctctgccaaagccgctggaatatcacgcaaaaactggtcgatttgattaatgccagcgacacgccaccgtcggtactcatttccggctcggcaacgggctattatggtgacttaggtgaagtggtggttaccgaagaggaaccgccgcataacgaatttacccataaactctgcgctcgctgggaagaaattgcctgccgggcgcaaagtgacaaaacgcgagtgtgcctgctgcgtaccggtgtagtgctggcaccggatggcggtattctcggtaaaatgctgccgccgtttcgtcttggcctaggcgggccgattggctctggtcggcagtatctggcctggattcatattgatgatatggtcaacggtattctctggctgctggataacgagctgcgcgggccatttaatatggtttcgccctacccggtacgcaatgaacaatttgcccatgcgctcggtcatgcgctgcatcgcccggccattttgcgcgtccccgcgaccgccattcgactgttaatgggcgaatcttcagtactggtattaggtggacaacgcgcgctgcctaaacggctggaagaagcgggttttgcgtttcgctggtacgatttagaagaggcgctggcggatgtcgttcgctgatgtggtttacagcaaacatccgccagttaactcccggtgttacaggattagtggctttgcgcgataagatcgtctggtgaaagtcgggtcaccatcataactaactctctgtctaaacctctatccagcatctcctgagcaatacgcagggcttcttcgtgtttgccctgcattgcgccttcttcacgtaatctgtcagcaatggtcatcagtttctccttttcttgtggtgcgcgttccgctatctcaccaataaatgcacgaaaacgctgggcatcccctgtttgtaatacgtaattaaacagggcttttagctgtctgtcattagtgttccctgtaactagcagcgaaacaatttggtcgactaatcccaacagatcgcgctgacgaatatgtttctgaattaactccaacagcgccattttgcggtgttgcataatctcgtcatccggcaccacggtaatatccaccaacggaaaagccgatgaatatattttgcgggctatagcaggctcggcaaattcatcaagccagcagagtgaataaggataaggacttctgcaaccatgataaaacagcatcgggagcaccaatggaagctctttatagcccgcatcaagatggttttgcattgccgcaatggaataacgcatcatgcgaaaagccattaattcttccggcttactttggtgctctatcactacataaatataacccactccctcctgcgttttcacagaccacaagaggtcggaataatattgccgcaggtcttcatcaataaaactgtttggttccagtttaagcgtcgttaaatcacacagtttgcgcagcggcgcgggaagatgaatatcaataaaatcccgcgcggtgtctggatggcgtaaaaaagatttaaataccgcatcatgcggcgtggaagttgtcgatattgtcatggcgttccgtcacccctcaaatttaagatgacgcgacaataaccacgattaacacccaatgcagcaggcagtttttatctttggacagcgaattcagaagtatttttagcggactgtaacttttacatttcagcggaagctgactcgcaaattccccatgaaaatactccggcagcgttagccaccggagaggaaattatttcagcgatcccttaaggaaccgttgcagacgagggctttgcgggttgccaaataactgctccggcgcgccctcttcttctattttcccctgatggaggaaaatgacatgagtagaaacatggcgagcaaagcccatttcgtgagtcactaccaccatggttttcccctcttctgccagttgctgcataatacgcaacacttcgcctaccagttcaggatcgagcgccgaggtaggttcatcaaacagtaaaacttccggttccatcgccagcgcccgcgcgatagaaacacgctgttgctgaccgccggaaagatgcaccggatatttcccctgcgcacgttcgtctatcccgacttttgccagatacttcaccgcccgctcgcgcgcttcctgcttgctcaggcccaacacctgaatcggcgcttccatgacgttttccagcaccgtcatatggctccagagattgaagtgctggaataccatcgtcaggcgtgtgcgcagtaagcgcagttgatttttatcggcgactttgagttgaccgtctttgtcgcgcaccagattgatcgtctggccattgaccacgatcgacccttcactcggtttttcgaggaagttaatgcagcgcagaaaggtacttttccccgatcccgacgatccgatgatgcttattacatctccggcattcgcttgcagtgatacccctttcagcacttcatgttcgccgtagcgtttgtgcaaatcgataacgtttaatttattctcggacatcgtattctcagtgcgttgaagaaggtttcacatgctgcaaccagcgtttttccgctctgcgaaagaggctgatcaggacataagagatgattaaatagagcaccgcggcaatgccgaaggcggtaaaaggttgatacgtggcggcgttaatatcgcgggctattttcagcagatccggcaccgtggcagtaaatgccaacgcagtagagtgcagcatcaggatcacttcgttgctgtatgccggtaacgcaatacgcagcgcagaaggcaaaataatgcagcgatacattttaaaagtcgagaagccataggctctggcggcttcaatttccccatgcggaaccgaacggattgccccagcaaaaatctcggtagtgtaagcgcaggtgttaagcgtcagcgccagcacggtacagttcaggccactgcggaagaaagcgttaaggaattcggttcccttaacaatctcaagcgtgtacatgccggaatagaacaccagcaactgaacatacagcggcgtaccgcgaaaaatataggtaaataaccagattggaaactggatgtatttattactggagacacgaccaatcgccagaaacagcgccaggactccgcctatcactaccgacaaaataagcagccacagagtgatcgccacaccagtaaagcgataaccgtcggtccacagcagcggtttccagtattcatgtaagatttcgatcacaggtcagccctcttcacacccacggagtagcggcgctcaaggaacagcagcacaccattggaaacagtggtgaaaaccaggtaaatcacgccacagacgatggcgaaatagaacggttcccaggtacttttgcctgccagttgggtggctttgaccacatcttccaggccgagtaacgaaaccagtgcggtagatttgaggatcacctgccagttgttgccaatgcctggcagggcgtaacgcatcatcgacggaaacatgatccgccgaaacacttgcccacgagtaaaaccgaacgccgtcgccgcctctatatgtcctttcggcactgccataaaagcaccacggaacgtttcggtaaaataagcaccgtagataaaaccgagagtgataataccagcgaccatcggatcgatatcaatctgcccgacgcccatcgcctccgtcaccgtgtttagcgcaatctgcaaaccgtagaaaatcagcagcatcaacactaagtccggcacgccacgaatcagcgtggtgtacccttcgaaaatcagccccgaaagccgattttgcgagagcttaccgccagcgccaattaaaccgatgattacagcgagcactacagagctgatagccagctccagcgtgacgagcgcaccctgtaaaataacacctgaaaacccatacaacatgctgcctgtcctgtcgtgtgtggtgaattaccgcctcttgtctccctccggttacccgaagggagcgggctttctttcaccgatggcgattagccaccataaacatcaaaatcgaagtactttttcgctaatttctcgtaagtaccgtcagcgcgcatttcggcaaaggctttgttcagtgcttcgcgcagttcgttatcttctttacgcaggcccatgccggtccctacgccaaacagtttttcatctttaacagacgggccaccgaatttgtaatctttaccgacaggttgtttgaggaaaccttcgctggcagcgacctcatcctggaacgcggcatcaatacgtccggcagtcaggtcagaataaatgttgtcctgcccctgatacgagacgatttcaatgccttttggtgcccaatgttcattaccgaacgtctcctgggtggtgccctgcaatacgcctacccgtttgcctttcagcgactcgactgtcggctgaatgtcagaatttttcgccaccaccaaacgagaatcggcagcgtacagtttgtcggtgaaggctatttcttgctgacgtttttccgtaatggaaagcgatgacatgatggcgtcaatcttcttcgcttttaaggacgggattaacgcatccagcggattttcgacaaacgtacattgcgtattgatgcgtttgcataattcctttgccagatcgatatcgaagccaaccagttcgccttgtgaattttttgattcaaatggcgcataggtcgggtcggtaccgatgcggatgttttgcggaatcgcagcaaacgccgcagttgcgctggagaaggccagaaccagagagagcgatagcaccagttttttcataatgtcctcaactgacagtctttttatagggaatatttacaggtttgttacacttatcgtgccataaaattgaccatcaaggcaaaatatcccgccccgttagacgtattatttttcattaaaaatgcttaagtatgcatttcaatgcaccacgatagtgcaacaaacctggcgtgcaccatgatgatcattccatcaggtacagcttcccagcgacgtatcagtcaccgtagacattaaagtcgaaatactttttcgccatcttgtcgtaggtgccgtcctgacgcagctcgccaagcgccttattgaaggcagccgtcagttcagcatcatctttacgtagccctacaccggtgccatcaccgaagtattttttgtcttttactgatgagccagcaaaggcgaaatctttaccagcaggttgcttgaggaatccttcgctggcagcaacttcatcttgtaacgcagcatccagacgtcctgcagccagatcggaatagaccaaatcctggttggcataggccaccacatccacgcctttactacgccaggtctcgttagcgtaagcttcctgggttgatccctgcagcacaccaacatgtttacctttcagtgaatccagcgttggctgaatcggtgaacctttggccgcaatcaaacgagaatctgcggcgtacagcttgtcggagaaggcaatctcctgctgacgtttatcggtaatggaaagcgacgaaataatagcgtcgatttttttcgctttcagtgaggggatcagcgcgtcaaagtcactggcaacccaggtacatttcacctgcatccgtttgcacatctcgttaccgagatcgatatcaaagccaacaaaatcacctttagcatctttcgatgagaacggtgcgtaggtggtatcggttccgatacgtaccgtctccggtagcgccgcatagctggaagccgctgtggagagaccgactaacaaagacagagcgagaatcgacttcttcatacataaccctcaagtgaaaatggcttttttatgttgtgtattgtgttgtgtgtttgcaggctctttcatgcaggtcttatgccatcttgacgacaacagtaacattcaacgttaaatatgttaataagacgttgcattattgtcctgaagttgaagatagcaggtatagcggttgaatcgcagcgtttcgattgaatggcagaaacaaaatgtcgaggatttgatcgcggttgcaaaattgccctgaaacagggcaacagcggagttatgcgccctgccagcgggcaaagagatcttcaggaagggttatcgcaaactggtcaagaacacgattaaccgtctgatttatcacatcatcaagggattgcgggcgatgataaaacgccggaacgggaggcataatcaccgcaccgatttctgccgcctgagtcattaaacgcagatggcctaagtgcaatggtgtttcacgcacgcagagcaccaacgggcgacgctctttcagcaccacatctgccgcacgggtcagtaagccatcagtatagctatggacaatgccggaaagggttttgattgaacagggtaaaatcaccatccccagcgtctggaaagaaccggaagagatgctggcggcaatatcgcgcgcatcgtgcgtgacatcggctaatgcctgcacttcgcgcagagaaaaatccgtttcgagggataaggtctggcgcgctgcctggctcatcaccagatgcgtttcgatatctgtgacatcgcgcagaacctgtaataagcgcacgccataaatcgcgccgctggcaccgctgatgcctacaatgagtcgtttcataaatagttgccctgtcagacttgcaggcagactttgcaggatttcggcgggagttgcaagtcagggtgccagaccggcaccctcagcgaaggcatcatccttcgttatgcatttcgagattttccacttcgttctgacgttgcactgctttggcgtcatcattacgtaacgtatcgaggaaatcgaggtagccctgatcaacatctttggtgacgtagacgccgttgaacaccgagcattcaaactgctggatatccggattttcagcgcgaacggcgtcgatcagatcgttcagatcctggaaaatcaacccgtcagcaccgatgatctggcgaatttcatcaacttcgcgaccgtgagcgatcagttccgtggcgctcggcatatcaataccataaacgttcgggaagcgaatttccggtgccgcagaagcgaggtacactttcttcgctccggcttcgcgtgccatctcgataatctgctcagaagtggtgccacggacgatggagtcgtcgaccagcaggacgtttttatcgcggaactcggcgcggttggcattcagtttacggcgcacggacttacgacgcagctgctggcccggcatgataaaggtgcggccaacatagcggtttttaacgaagccctggcggtacggtttgcccagaatacgagcaatttccagcgcgatatcacacgaggtttctgggatcgggatcaccacgtcgatatccagatcttcccattcgcgggcaattttctcgcccagtttcgtgcccatattcacacgcgcgctgtaaacggaaattttgtcgataaacgagtccgggcgggcaaagtatacatactcaaacaggcacggattgctgaccggattgtcagcacattgacgggtaaacaactgcccttcttcagtgatgtaaatcgcttcgcccggcgcgacgtcacgcaggaaatcaaagcccagcgtatcgagcgctacgctttcggaagcgaccatatattctgtacggttctcgtcaatatcacgttttcccagtaccagcggacgaatcccgtttggatcgcggaaagcaaccataccgtggccgataatcatcgccacacaggcatacgcgccgcggattaagcggtttgtggcagcaatggcagcgaaaatattgtcggcttccagcgggtagtggcggaagttgtccagctcgctggcgaagatattaagcagaatttccgagtcggaagtggtgttgatgtggcggcgtttttcttcaaacagttttttacgcaactcgtgagcgttggtcagattgccgttgtgggcaagcgtaatgccatacggggagttaacgtaaaacggctgcgcttcagaggcgctggagctgccagccgtggggtaacgcacatgaccaatgcccatattgccctgcaaacgctgcatatggcgagcttcaaatacatcgctcaccagcccgttcgctttacgcaaacggaagcagttattggcatctatggtgatgatgccggcggcatcctgaccgcgatgctgaagcaccgttaaggcatcataaatcgactggttaaccggcataacaccggcgataccgacaataccgcacatacgtctttttcctcgttaagccacatctcagagcacttacgctctgggcaagaaacttgacgagctttgcagataatcaaaaaaccatctgatgataaaactgaattgcgggatcagctgtgatttgctccagtcttcgcttttcgacaccccggtaaaggagtcgagaaagaagagaatggcagcaacaatcaacacaccgcgcaacgcaccgaaacagacgcccagcacccgatcggtgcctgacaaccccgttttctccaccaactggcctatcacgaagttcacgatagcaccaacgatcagggtagcgataaacagtaccgcgatggcaatcccatttcgaaccagttcgtcttcaaagcccgtaaaccagactgacaggtaagtgtagtaatgactggcaacaaagaaagcacaaccccatgtcaccagcgataacgcttcacgaacaaagccgcggatcaggctaaccagagaggaaaaagcaatcaccgcgattatggcgtaatcaatccagaccatatgtgtcccacgattttacgccctgtcatcctgttcggggcgcattctaacagaaaaagaaaacgtttgcgtagagatttccttcccgcgcatcaataaaaatggcgctgaaaaaatattcaacgccatcgactttttatgcctttgcggcatcgggcaatgcgtgtcggatgcggcgtaaacgccttatccgacctacggttctacccctgcgtaggcctgataagacgcgccagcgtcgcatcaggcaagaccgtattaattcggcgtatagcccattaccacgccacttaagccagaaagttgcttcaactcacccagcgaacctttcagcttatctttcgaggcatccggcccaaccagaatacgggtaattttaccctgcactggcgtggatggcgacgtataaacccgataaccggcaccgcgcagcttaccgacaatctcattcactttatcggcatttttcagcgcacccagttgcacaacataggctttacccgtcggtgcagctttttcttccacgaccggcttcggttctggcttcggcgcaggtggtgcttcaacctttggtttaggcggctccaccggtttcggcttcggtggggcgaccggtgcaggttccggttcaaactcggtgttattggctgcaatagtggccggatcgagcgacggtgctgcggcatcacctgcccgcacctcttccgctgcgccttccggcggctgcgtcggtaacgcctgggtggcggctggcatcatatcaggctcatcacgatcgcccgctttcggcaccagcgggatagccgcgaactcatcctgataatgttttttctgcccgtccagcagccctggaagtacaatcacccccagcgccaccagcacgatcgtgcccactaaccgattctgaaacttacttgccaccgcttctcctcgcgtcaatcacttccatgacatgtgcgaccgtgtggaaagaaccacacaccagcacggtgtcttccgctttagcgtccgccattgcggcatcccatgcctgcgcaacgctatcaaatgatttgccgttacccaaatgctcaagcagttgttctgccgtggcaccgcgcggcccttccagtggcgcacaataccagtcatcaaccacgcttttcaaccaggccagagttccggcaatatctttatcatgtagcataccgataaccgccagcacgcgcccgtttttcggtagcgctttcatacgcccggtgagatattccgccgcatgtggattatgcgcgacatcaaaaataacgcgtggcgactcgctcacaatctggaaacgtcccggcaaaattgcgctggcaatcccgtcgcgaatggcattttcactgacttccagcccgctggcacgcagtgccgccagcgctgttgcggcattcggttgcgggacaagcggcaacggcagattttccagcgtgccgtgagcatcgctaaacgcccagtcatgatcggtgacggaatagttccactcaacgccccgacgttgtaacagtgcacctttttcctgcgccacatcagcaatggtagaaggcatttccggctcaccgacaattgccggtttttcgctgcggaagatgcctgctttctcgcgaccaatactttcgcgatctggacccagccagtcggtatgatccagcgcaatactggttactaccgcgacatcggcgtcgacaatattggttgcgtccagacgaccgcccagccctacttccagaatcaccacgtcaagttgtgcctgcttgaacagccacaacgccgacagcgtaccgtactcgaaataggtcagggaaatatcaccgcgtgccgattcaatctccgcaaaagaggcggtgtgggccgattccggcaattcctggccctgcacacgtacgcgctcggtataacgcaccagatgaggcgaactgtagacgcccactttgtaccctgccgccatcagaatcgactccagcgtacggcaggtggtgcctttgccattcgtacccgcaacggtaaacacaaatggcgctggtttcaggacgccaagacgcgccgcgaccaggctcacgcgctcaaggccgagatcgatagttttactgtgcaggttttccagataagaaagccacgaagccagaggcgacgcggcttgaggagtgcgtttgataatcatggtatccgctgattcgttacggtgagaatagcaaaagggcagagccagtggccctgcccttatcagttatcaggcctcaggttcctgatccggtaccgggggtaccactacgccttcacgcggcgcttcaggattcggcgctggcagattcatcaacttcgccagaatgctcgccagtttcaggcgcatttccggacgacggacgatcatgtcgatcgcgcctttctcgatcaggaattcactgcgctggaatccaggcggcagtttttcgcgaacggtctgttcgataacacgcggaccggcaaagccgattaacgctttcggttcagcgatgttgagatcgcccagcatggcgaaacttgcagaaacaccgcccatcgtcgggtcggtcagcacggagatgtacggcaagccgcgctcctgcatttttgccagtgccgcagaggttttcgccatctgcatcagcgacatcagtgcttcctgcatacgtgcgccaccagaggcggagaagcagatcagcgggcagttatcttccagcgcctgctcaacggcacgcacgaaacgtgcacccacaacagaccccattgaaccgcccataaaggcgaactcgaatgccgcagcgacaaccggcattccatacagagtgcctttcatcaccaccagcgcatctttttcgccggtttctttctgcgcagatgccagacggtctttatacttcttggagtcacgaaacttcagcacatctttcggctcaagctcgctacccagctccacaaggcttccttcatctaacaggctatgcaggcgattacgcgctgtcatacgcatgtgatggtcacacttcggacagacctcaagattacgttccagctcagcgcggtataaaacctgaccgcagctatcacacttagtccacaccccttcaggaatgctcgccttgcgggtgggagtaatgttgcttttaattcgttcaatccagctcattagggacctttctgtctgaacctggttcgatgccagttttatctttggggacgcataatgccatttttgcccccaacagaccatgaatgttgcacattaaaacataacagcccgaaactttggataaaaaagtggtcgaaccgcggagttactttttattttgcggcgcgtgccgcagcgcgtttgtgacggattatttcgatgacgcccggcaaaatagaaaccacaataatcccgacgatcagcagcttaaggttatcctgaaccatcgggattgtaccgaagaaatagcctgcgtaggtaaaaagcagtacccacaacagtgcgccgatcacgttataagcggcgaaatgacggtacgacatgtggcccattcccgcaacaaacggggcgaacgttctgacgatcggcacaaaacgggcgagaataatcgttttgccgccatgtttctcataaaactgatgggttttgtcgagataactgcgacggaaaattttcgaattgggattactgaacaacttttcaccgaacaaccgcccgatagtgtaattgaccgcgtcacccacaatcgcggcgatcagcatcagcaccaccatcatatggacgttgagatcgttggtttccagtgatgccaacgctccggcaacaaacagcaatgaatcacccggtaaaaacggcgttaccaccagaccggtttcacagaacaaaattaagaacaaaatggcataaacccagacgccgtactccgcgaccagctctgccagatgcacgtcaatgtgcaggataaaatcgatgaggaaataaatcaggtccatatttgcctatgccttgtactcgtcatctttcaggctgtaactacgttggctacagcctgaaatgttccgagcattattctcgttagtccgccagaaatagcgggcccattggcggttttggaagatcataccggtcagggtaatccaccgcgaccagatacagcccttccgcttttgccgttgctgccgccagcgttctgtcctttgccgccagcaactctgctatccagctctccggctggttgtgggcaccgacttccatcaggctgccgacaatattcctgaccatatgatgtacaaaagcattcgctttaatatctaccaccacataaggaccgtgacgcgtgacattaatatgcataacgttgcgccacggggttcgggactggcactgcaccgcacggaacgaggtgaaatcattctcgcccagcaagcattgcgcagcccgatgcatccgttcagcgtccagcggttcgtaaaaatgggttacccctttactcagtaccgccgggcgcagccgatgattgtagatgatgtagcgataacggcgagccgtggcgctaaatcgggcatgaaaatcatcaggtacagctttaacccaacgcacagcgatgtcaccaggtaaattcgcatttacgcccaaggtccacgccgcgtctttgcgcagcgcggttgtttcgaaatgcacaacctgcccggtaccgtgtacccctgcgtcagtacgcccggcgcagaagacggtgatgggttcgttcgccacctgggagagcgccttttccagcttctcctgcacactgcggacttcgttctgccgttgccagccgtaatacttactgccgtcgtactcaatgcccagcgcaattttataaactggcggttgttgctggtcggacattagtacagatactcctgcaccagtttctcggcgatttttactgccatcagcgcgccgccaaagcgaacgttatcggccaccgaccagaactggacttgctccggcataccgtagtcattacgcacgcagccaacagaaagatgcggcgtacccgaagcatcacctacctgagttgggaattcgttctcttcagagagcacaatatcttcgccttgaacaaacgcatcacgcgcttcttctgctgccagtggacgcagagcttcaaagttgaccatctgggcatgaccgtagaataccggtgcctggacgacgctagccgaaatcatcagcccttcgtcctgcaggattttgcgtacttcgtcaacgatacgacgttcttcacgcacgctaccttcgctatccggcagtaacggcagcatgttgaacgccagctgacgcccgaagaaatcttcttcgtcaatcggaatgccgttgagcaatttcgcactctgccccgctaacgcatcgaccgcttttttgccctgggcggaggctgaaatcaggctggtaacgctgatacgtgataaaccgccctgatcgattaacggtttcagtgccgccagcagctggctggtcagactgtctggtacggcgatgacattccggttccggtaatctgtcagtacaaacgggtttacttccggcaccaccagcggtacgtcgggttcgagagcaaacaatccactgctgtcgatcaccaggcaacctgagttggtcgcttcttcaacccaggcagcggtagcttctttgcctgcgacaaaaaatgccagctgcgcctgcgtccagtcgaattcagcggcatcctgcacggtgattgtcttaccaccaaagcgcagttgttcgcctgcgctttcgttacgtgccagtgcataaatttccccaaccgggaactgacgttcagccagcgtttcaagcagggcttcgcccacagcgccagttgcgcccaggacggcaatgttccagccttcagacatggtggtttactccagaaatagcaaagctccctgccaatgttacagcagagagcatgaagaagagattaacgtgccggatgatgaacggcgttaaaacccagtttacacagcaatgatgccgcactggcgtcatcacaaattacatacagagatgaccattcacggcgctcaagatagtttttgcgcagtttatcgaactcacccggtatcccggcgactttacgcagcggtgcgtcatcgcggcgcacatcatacaccaaatgcaccagccttttcagcgtcggttgatcgagcgggccatgcagcgtaatgcgaccaaactctggcgcaggcagtaatgtatccagcgcaacgtgctgttcatgcccaataaacttgctataagcttcaaacacttgcgtagtaccgcgtgctttaccttccagggtatagcctgcgatatgcggcgtgccgatatccacttttttcagcagctcgacgttgagttccggttcgccttcccagacatccagcactacgcttaacttctggccttcattcaggcaggtcagcaacgcagtattatcgacgactgcgccacggcaggcgttaatcagaatcgctccgggcttcaggctacggatcagtttttcatccgccagatgtagcgttttgtacggaccatctttaaagagtggcgtatggaaagtcagaatatccgcgcgctggactaactcatccagcgagcggaaatcaccctcatccccacggtcggcgcgaggcggatcgcaaagtaaggttttaatccctaacgcttccagtcgcgcctgcaatcgacgtccaacgttaccaacgcccacgatccccaccgtacggtcgtacagtgaaaatccatcgcgttcggcaagcatcagcagggaggagaaaacatattccaccaccgcaatcgcattacagccaggtgcagcggaaaaaccaattcccgcctgcttcaaccatgcttcatcgacatggtcggtccccgcagtggcagtgccaacaaatttaatgggttttcctgccagcaaagattcattcactttcgtgaccgaacgcaccatcagcgcatccgcgtctgccagttgagcgacggggattggacgcccgggaaccgcggtcacctcacccaaacggctaaataagtcgcgggcataaggcatattttcatcaacaaggatttttaaccctttttcagtctctgacaatctaaggctcctttatcaacaaacgcccatttgcaaactgctgtttaatctgaaaaaacattaataatcatacagataacaacataaccatttagacgggcaatactgaaaaattgttattcagtatcgccctttaagccgtttcaggctatataaaattaatcccccgtggacactgcgtggacacttacgccacctttcagcggattaagggccaccgcatcctgcaggtaatccggtgcaaaatgcgcatatgccattgtttgctgaatggttgcgtgaccaagaatcttctgaagcgcaataatgtttcctccgttcatcacaaaatggctggcgaacgtatgccgcagcacatgtgcagcctggccttttggtaaatcgggcttaactcttttcagcgccaggcagaattcccggtacttcacctcaaacaagctgcctgtttctctggttttgatcgcctcacaaactgcctgcgaaattggcactgttctcttccggccatttttggtttcaagaaacgttacacggttatgaactatctgttcaccacgaagcttacaagcttcactccagcgcgcccctgtgcttaaacacaaaagcgcaacacgccagtagtcgccctccagtgtatcgagcaatagcgccacttccttctgtgacaggaacgccatttctcgtggagatacataaagaatagaaattccccttactggatgttctgcatcccaaagacctatttttttcagcacggtaaacattccggataaccgattcatgtacctgttagcagatgacggtttcaatccttcagctatcttttgagaacgccacgcgataattttcagcttatcaagatccacagcctgcatatcagcgccaagctcattaattatgttgcgcagttgttttcggtcttcttccgccttacgcctgtgctggccgtgatacatccaccacaactcaagcaaatcatttagcgttcgacgatcacggtagccctgtatatattcccgcttttcagcgttcgccatgatgtagcgttcagtggccaccgctaccgattttttgtcaaataccttacgcacgcgctttcccttgcgtccgttcggcctgatgtccagcaaataacgaccatcttcgagcttcttaatcgacattacgaagccctccaatgaaccgctctacaatttctccagcctctttccagcaataatcagaccagacaaaaagcaggtctaaccagttttctggcctcagcgggataatttttggattgtttcggttgaaacgcgatctccctccgaattgcaggaaccatcaagagagagagccggagaaatttgcccgacctccggcatcgtttcatctgttgataaccaataagcatacttcttaaatttagggtgtttcgtaaccttaagtaaggcaccctctgttacttgcttccccctcacctcatagttagttaccgtcccataaggcagcccaacacaatccgcaaactcctggcgggtcataccttctgcttcacgaatcaggcgaaatttttcacccatgcttgacaaagatgccatatcgggcatatcctccatcgcaacatgccacatcgggcacaaacataaaaacactcaaataagccgatataagccattttgagccattcgaacgaattagggagattaccacaatgagcgaatcagagcttggggggttcattcaggtagcaccatatccacttgaagcggtgccatatcaactattcgccaagatgatcggccgcaaggaatccacagtcagaaccatgattgacgcagcaaagctaccgacaattgactttgtgaaaccaggttcagtaaagacgcgtgcatcagaaaactgggtatatctgccagcatttaacgaaggcatgcgcaaagcgttttttgagcaaccgaaagaacgccgcgacgcatggttgttgtggctgggactttagtcataaatgaccagccatatcatcagcgccattctgacccttgtttttattgagataggcgtaatagagatctatttgtttcgcaagttaacgggacatgaagaacgctttattgaactcagcattgaatatatcgccgcttataccaaaggacttttcccggcagctattggggcgatgtttatagcgtttgttatctggtttatcggatgagaaacctgacaacccacaactactgcaatgagggtaattatgtgtggcatggacaaattggatcttatgttaattgtaatactatcaattaacttcggttacctcttaagcggcgcaattctcatgtgcggaggcaaacgaaaatgaaccagcagtccgcaaaacgtgaaaacaatgcgatgcgatttaatcgcaaatattttgagttcggcctctatgccggaataattaaatctgtacagagtctttaacatgaaacagcaacgtaattcacgctttcgcaatggtgcagaacgccacgctaaccgttttgctaccagtgcatcacgcagcaacatccgctacagcctgagtgatacacacgcaacgccggatggctacccagtaaaacaaatcggcgagcatgcctggctgattgagaaagctggaatcgtgatccacaaatgcccacacaatccgtttaccggaaaccgcatttttgctctaagcagtggcgacaatcagttcgggcaggatttcacattatacgaagcacttcgcacggttgatcgtctgcttcgcgggcaaagttttattaaacaggctgatttataacaggtgctttatgaccaaagaccatgcacaaggtgtatttatccgttttattgattttcgcggcgaactgttattacgtgcatccgctattgacggagtgactccggcgggtaaaaacggagccgacgaagccacttacgtttatctgaacggcacgcgactgcttctggaacttccgtaccagaccgtacgagaaatcattagcgaagctgaaaaggcacgccaggctaatggcgatgaaccctatatcgaaattatttgtatggattcagaagctgaaatacagaaagcagattaaagggcgttgtgatgggcaaagaatataaaactctcattaacaaagcacttgagcgtttttattttcgcttaagtgcatcaggcgctcatgctgaacgtgcggcccgtgactcattgaccagagcaatccgaagtctgtatgacgtggctttttacgctgatgatctggatgcacttaacgaactttccgagctgatctgtgccgcagaatgcggggaacatattgaaccgtataagctggggaatatcgcatgagtatatttatctcatggcttgttctgattatttcggtggcctgcgctattgggattatgcgaattattcattcaataaaaaagattgaacgttttttcactggcgaataacagagcaaataaaaccacagataaaataagaaaatgtaaaaacaatccgcattagcggaggtattcgcacacgccaaggaggcgtaatggcaattaagcattttcctgtcgttcgttttacctccagagggcgtgaatacgaagtcgacgaacgcctgattaccacaatcgacaaacaccgttcggaaaaggatgcacaccacatctacctcactgacggcacttacttctgcgccaccaacgtggcgcgggtgaatcttatccgacaggtacaggagccacgcagatgaccattctggactacatcgctacccatccgggttgtagcggcggagaaatcgccgcagcactgaataccccaaccacagccatcaatgctgagttacgccgactctggcgcggcggcttagtcatcagaacaaaccgcagcacaggtggtcgcgctcgcaaagcaggaggccaagcttcttaccacgtaaacccgatgccgttcgggtgtagcaatccacttactcacatgtttaaccagctactgaaggaaaccagagcatgagcaccatcaatcaccagaagctacgcgaactggcatttgccctgcaacgaatggcaacgcctcaaaaattactggtatttcgcgcaatgctctcgccgtctgctgtgctggcactgctggatgagctggagcacgccagaaccacggctcctgccattcgcctgacgctccatcatgaaatcgctgatttctgcgcgacgttgaaggcgccaggcgaaccggaaacaccggaagcaatacagcaagagctgctgcaacgcattgacaaggtttttgatttttttctgaaccagtaagaaaccagaacatgcacacacaaaaaaaccgcttgccatgccgcaatcagtcaggttacatttccgctgcacctcacaaaacgggtgtcgggtttcgcagcctgctgactacacaagcgcacaaccgcgccagcggtttttttgtgcgtactgtattgccacgtttttttcgcgtcagaattatggcggggcgtacggggccgacttcggtcgggccgggttcttgtgtagccggtactgcgaacctcgtacgtctcgccacccacagtttcgcagctctggatggtgagttttcacaacttactacacaaggggccacaccatggcaaaccgcaaaccacaccgcgctatcgcggagcgtcgtcacatccagactgaaatcaaccgcagactttcccgcgcatcacgcgtcgcgcaaatcatgcacatcaatatgctgcatgagcgcagccacgcactatcaaacatttattccgcctctgttttcagctatctggcggatgatctgcacgagcttcaacagctcatccagcagcaaaacaaactccattaattcctgttccgggcctttcctgcaccttgcggcgggaggccttcgcacatctgtaacaagaggattgccgcaatgattctcgccaacgactttcttgaatacctgctcaacacagaacgtgatcttgccgctcgcgtgcgtgatcgttatgacatgtaccagaaatccctgcctgtaccgcagctcgctgacggaaagattgttattgatggtcgctacatgattgacagccacgagggaaattacaggctttaccgcattgaaggtggcaccccgtccgttattggcatttaccagcgcccatcctctgcaatcgtcgatgtgattgccgacagcatccgcatcacacatcgccatgccgacacagaagacaccgtgctggaaattcagcggctggctgccgtctgccgcgacaccctgaatggcatgacgaagtaaatcactatgacggcagagtatatcagggactggcaacaaccgcgccacgcagtggggcgtgaaggaacggagatccccgctcctgaatccgcgctttcctcctggctggatgcctaccgggtagagaacgaacgccgccaggaaatggctgatgcggcgttctccgccacgccgctgggcaacctgattaataaaagcctggacgcacaggaaaaacaggacaaaaccatcacactggcaggagacgccagaaaacaggcacgtggcgcggtggatgaagccatggcctcactgcgcctgctgccgtcctatctgcgcgatccgcttattcgccacctctccttcctgcgcaaaaaacaggaagccgatcgccggaaaggcaaaaagagctggcaggctgaacgctacgcgtgcggaaccctgcgcaaaatattcgaacgtctggaccgcaccgaccaccgctggctgacaccgggttatcgctcccttgccggacgcgaacgcctggatgatttgctttacctgccgcagctcaacaaacaccagatacagacgctggccaccatgacggcggcgatgttcagcagcaccttcgaaaaactctgcgatggctttggcgcgactgatggcgagctgaccatggatgtaacgctgaaggcgtatcagatgctggcccgcatggcgttacacctgcacgccatgcctccacattatgacgcactgacaacagacaaagaccggaggaacgaaccggacacggagctgctgccgggcgcaatccttcgcctgacctgtgcggaatggtggaaacgcaaactgtggctgttacgttgcgagtggagagaagaacaactccgcgccgcctgtctggtttccagaaaaacatcaccctatctgagccaggacgcgttaagcgagtttcgcgcacagcgcgagaaaacacgcgatttcctgaaaagttttatgctggaaaacgaagacgggttcacgattgatctcgaaacagtgtattacgcgggagtaagtaacccggttcaccgtaaggcagaaatgatggccaccatgaaggggctggaacttctggccgaagcccgtggcgacaaagcggtgtttctgactgtcacctgcccgtcaaaataccacgccacaacagagaacggtcatccgaatcccaaatggaacggggccaccatgcgcgactccagcgattacctggttaacacgttttttgcggcggtccgcaagaaactgaaccgcgacggcctgcgctggtatggcatccgcacggtggagcctcaccatgacggcaccgtgcactggcatatgatggtctttgctcatccggaagaaatcgacaccattgtgtcccacacccgcgatattgccattcaggaagatcgtcacgagctgggtgatgatattaccccacgctttaaggcggagtacgtcgacggctcaaaaggcacgccaaccagctacatcgccacctacatcggaaagaacctggacagccgcgccgtagatggcatcgacccgaaaacgggcaagccacgcgttgaccacgaaaccggaaaatcaatggccgagagcgtggaacgcgccatcggctgggcgcgccttcaccgtgtccgccagttccagttctttggtatcccctcccgtcaggtgtggcgtgaactccgccgccttgccagccagatggcacgcaacccggaaggcccgcaacggctgaaggatgacgcaatggatgcggtactcgctgccgctgatgccggatgttttgccacctacatagagaaacagggcggcgtacttgttccacgcaaagactacctgattcgcaccgcctacgacctcgcagatgagctgaacgattacggcgaacagagcgtacagatttacgggatctggtcgccgctcatcggggagtcttcccgcgtatgcacgcatccggataactggaagctggtaagacgcaaaccggaagcggaagacagctcccacgaaaatggttttgaccttcagggcggccctgccgccccttggactcgtggcaataactgtccccgtgtacaggaaacggacaacaacgggacagaacagccggaagaacggccagcaccgtggccgcagcttcctgacggcgttgacgtgaatgaatggatgcgctcactgaaacggcacgaacgccgggcgctgatgcgttcgctgcgtgacaaacaggcaaaaaacagcagtgatgaaatgcagaactggacacagagccgcaaacagccacggcctttgcctgataaccacgagttactcgctaaagaatggcgggagtctgctgaatctctcggcctgcatatcggtgaacagcagatgcagcacctgttacggggcggcagtctgtacgttgacggcagcatcattgcaccgcagggatttgaaattgtacgcaaaccagatacccgcccggacagccgaatcacgcaactctggcagcgcctgagccgtaatcacggcgtaagcagcacggagatccgccataacccggtcgccagctatctggaacagctgggggcatcagaccccgaagccgccgcacacctggcatccacacttcagcaggaccagaacaccatgaaaacccccgttaccgtgctttctgacatgctgcgcgccatccgtgacgcagagcacgcacagagaatcagtgaaaccactgaacgcgcccaccgcaaagcagacctgctgcggggtagcctgaccagtggaaacaaaaaacagacagaaacgggactcacaaatcccgtaaatgagcaaaaaacgtgccgcgatatatgaagcgcgcacaaaacaggcaaaagcgggatttaaaaatcctgtaaccgattaattaatcaacataaggaaaagcgacatgaaaatttgtatcgacgacggctccaccaacatcaagctggcatggactgagaacggcgaacgccgcaacgccatcagcccgaacagcttcaagtcggaatggtctgcgccgttcggtggcacgcagcccgcgaactacatgcttgatggcgtgcgctatggttttgatccggtcagcgatcgctttgtccagacgaccgacacgcaataccagtacagcgatgtgaatataattgccattcatcacgcgctggtcaaatcaggcatcacaccacaggaagtggatgtggttgtcaccctgccactgagcgagtatttcgatacaaacgcacagccggacatggccaacatcaaccgcaaaaagcgaacgtcatgcgcccggtggagtaccagaacggcgaagcattcactatccgtaacgtacgggttatgcctgaatccattccggctggctttaaggcactggctgacatgagtccgtttgaatccctgctgattgtggatttgggcggaaccacgctggatgtggcaaaggttcaggggcaactggcaggtatcagccaggtgttttgcgatccacacgtgggcgtttctctgatggccgatgccgtactgtcggtgatggcccctaacggtatgcgcaccagtcaccacatcgccaataccattatcgaacatcgccatgatgaagcctggctgcgccagcacatccacaatgacgcgcattacgccagcctgatggcggttattcgtgaaaaggaagaaacactgaaacaacgcgtgatccgcgcgctggcggttttttcgggttacgggcgggtgatggttgtcggtggcggggcggagattgtggcacccgctatccgcgaagcctgcggagttaatgcgactttcatcgcggacggggtgccacagtttgctctggttaatgggctgtacgcaatggacaaggagtaaaccaatgacgacaccaaccagacggataagtttctatctgaagcccgccgccgtcaagaacgaaggcgaagcatgcgcatggctggacagccttacaccagaagcccgcaaaagcggccaacgcgtggcttttctggccgggctggcacttctgaaaatgaatccggcagaggcttaccgactggctgcatgggctgacgatgagacgttatcagtgacacaaaccaagacagaacgccccgagtcacagccagtaccaaccgcacagataaccagtcagatggccggaaatatcagggcgttatttcctgaataacacaacatcagggcgagttcgccctgctctccacctcagaacataaacaaggagaacgacataatgagcgaaatcaactatcaggcattacgtgaggcagcacaaaactatcaatcgacgctggcgtggtatgaggccatcgcggataacccaaatgctgagcaggattgtaacgaagcagtggcggcgtttaagcgtcaaatccgtcatcaggaaatggacattatcgccgagctgctggaagaactggaaaccaaagacaacaggatcgctgaactggaaaaaatcgccactgaccatgcacttaaattccagaaagcacaggacgcattaaagcatgccgctttgctgcatagcaggacggcgcaacaaacaaataattttgcagtatcgcttccggacataagcgaatatttcattaatgacgtatttcagcccttgcgatacgagcgggatgttgaaagagccatcataaaggctggcggaaaagcattgtggcaggagaaacacgaggacagaacgcatcagtcctgcgatgtaaatcgtggatggtttagctcactgacgacagataaaaataacacctgctccccctcaaaccagggcgataatcgcgcatcgcccttctgcacaatagtgcacaaatttgcacaatttttttgaacgactttttacccttccggcccgcatggcggctggatccgtcaaggatccgtgcgtgcacaaaaaaacgcgctttttctgcgcgcaggtgacgggggaacagcccgcgtttcagggggtaaatagcgttcccttaacgatgtcgcagcgacacgacagaatggccgtatttctcacgctgagcgtgaaaaatacgtgagggattctggtttgatggggtgaaaggtaaggccgtcaaaatcgcactgaggcggcgagaacatgcagtcagcgcagtgggattgcgtaagaatctgaccgtcgatgatggcaataagcaggaaagcgtcgtgaaattatctgactgatacaggagctggagagtcggggcataaattttttatgccccggcgaagcagcagacaagcgaagcgcgtcaggatgtgggctgggtatctaacagtgcgtaagggttaaagcggatcacctcttcgccaagccagtcattgatgtgcttcatggcctccatgacgggcatcagctcgttaattgcgtaaacccgcgcggccttctccacatcaccaaacgcacttttttcgcccggcatcgcccccatcagttgcggcggaacgcggtgcgcagccagcacatcatcacgggatgccgccttaacattcatgaactcatcctttgcggtgatctgctggaacggcaaaatttgcaccccctctttgcccccgttgggcgcatgaatgagcacgtttttaaacgcaccaccaccacgtgccccctgtagcgtttctttcagggagtccatgctttcgcggtttacctgcgctgcaccgatgtagatgatgcacccggcgtgggatccgttgtcgtagtacagttttctgaacatgtccgccgaatgagaaaggctggccgagagtaatgcgccaagatattccggcatgccgtagatttcctggttaatatccggattcatcaggtggcacactttgccaggacgaaactgaaacgcgtccttgccatcctgcacataccaccatgattcaagatcgcttccgcgtcgcatgtatttcgccagggcgtgccgtaatttaagcggttcgccgagcatattgctccgaagctcaaggaatgcgttaccgaacacaaaccagtccagcgccagcgccgagaaatcctgccgggaaagcagcgggtgcggaatatagcagccgagcaatacattgcgcttaaagtaaagcgcagactgatgccaggacgtttgccgggcagctcttgccagaccgtaccagtccaccggggtttcataccaccgcccgttatcagcacagtacatattgtccagcaggtcatgcccggtcaggcgataaggcccatcaaatgtgaatgcactgagcgatgattctttcctgagcgcatcagcgagatcaatgcgtgaactcatgcgcacttttttattttttctgctcatcagaactccataaccgtgaaacgctcgttttctccttcgccgccaatcggttcgttaatgacagcaagcatggttgcccacgcaaggtcgccgtggctgatccccctcgctcggtccgtttcgtaagtgataaagccgcccggtgttttcaccttacgcacggcgttaaaggccgcgaccagctcgcgttcggccgatcgtattcccaccgcccggcacgcattatttgcagcattttcagtaccagcgaccgttttgatgacagcgtgaaggtgtacggaatagcagcagggaaaaaccgtttcactatctgataaacagcctccccgttcccgcccgtcacatcaatgccgatgtgttccacgttgtagcgacacgtgaactcttcaatgactctggcctgttcttcaaactccagcccctgaacgcgtcgcgtctccaccgttcgaaaacggccaccaggaacagccggaggaaccaccacggacaccgcgccgctgtcgccgttgccactgctgccgtttgcgtcatacccaatccataccggacgatttcccatcgggcggggagcaaaaggtttccagtctttccagtcgtcgtatccgtcaacgccgcagccaatcaggatattcaggttaaatgccgattccccttcgcggacaaactcacacatgtagagattgaggaactcgtcttcggtgttttcatcgcggatttcgtcaatatcggtgtgtttccagccgtgattaaccacatcttccagcgtgacaatctgccgccacgtccggtcagggcagataagcccgttatgcagcgttttccagtccacagaaaaacgctggcgtttatgcgtggcctttttctcgttccagcggtcgccattccagtaggcgtatgcctcgtgcgtttcggtggatggcgtggagaagtaggtgcgccgcagtccgctgagggttgccatagcgccagccaccttgcgcagttcagcaaagcgactgacccagaaaaattcatcaaaataaaaattgcccgtgtaggactgtgccgtcgcagcagaagtaccaagaaaatgcagctctgcgccgttggagaggatgattttatcgccccctttcagctccacatcaacttcagccgcagccttctgaataatgcttttaaactggaacgcctgacgacgcgacgcagacaaaaaaatctggttacgctggtaaggttgtgccacatcgtcacgcagcgccatcagcagtgcttcctgtgcaaaataccaggtcgccccaatctgtcgggatttcaggatcatcctgttacgtatcccggcttccctgcaaagggtcagggagtcaaaccagccccgctgatgccactccagcctgctgatgattttttcccgcagtgcggcaatctgttccggcgtgaaatgatttttgagttttttcgcccggcctttctttcctgcggccatcacatccggctggccatcatgcagctttttaagctgccgggtcagcaggtctatttccttgaagtcaccacctgttttattctgtttttcagtaagctggatgaggcgcgcatcgatggactgcgtgacacgctgcacgggtggcgtttcatcccactggtcacgttttttccacgcataaatcgtgttcgggtttattcccatcagacgtgatatttctgcgggcggataaccctgccagtaaagttgccgcgcacgctggcgcacaaaagcgtcctgaatcattgctccccctgagtaattacaggaagattacccgcgcgcgaaaccgttctccttaaccccctgttctggccgttttcttacaacaaaagccctttgtatcagcctgttacgctttgccatcatgactgaagaaccagtcagaggggcaaaaactatggctaatgaaaaaaagacatcccgcaaaaagtttcgcgtggctgtctccggtgtaacggcagacgggcgcgaaatcaacggcgacatgctgaaagctgccgccaccagttataacccgtccgtttatggtgcacgtgtgaatattgagcacatcctgtcaccactccccggtagcgagttttccgctatgggcgatgttgtggggttgagcaccgaagacataaccgatggcccgctggcaggtcgcacggcactgtatgccgaaattgagccgaccgctcgcatgatgtccctgcttaacgatggtaaaaaaatttactccagtattgagctggaaccacagtcaaccatcacgggaggcccttacctgcgcgggctggcaatgaccgacacccctgccagcctgggcacggaacgtctggcctttgcggcacaacaacgtatgcaactgatgacattcaactgtcagcagggagacgtggcgatgtttaccgccgctatggagtcagaacttatcgaactcaccgaacaacgccaggaagaaggcacccagtggtttaaccgcgtaatggggattattggccgtggccgcaaagcggatgacgccagtttctcccgcattcaggaagcggtggaaggcgtcgcaacgtcacaggccgacattatcgaccgttttaatgcactggaaacccgccatcagcaggacagccagaaaatcacttcactgaccacagagctggcagcactgaaggaaaaactgcgcacgcaggacggcgatccgcagaaccggttcaccgcaacgggcgcagcctccgaccagctggctgacttctgataagacaaaggagcaaattttttatgaatctggtgatgtcagatattacccgcaacaagctgggttgctatatggcgcagcaggcgtcgcttaacaatatcccggtttccgcactggtatcgcgatttaccgtggaaccctcggtacagcagcgttttgaaaacgcctcaaaggaaagcaccgaatttacaaaaagaattaacgtgatcggcgtgaccgaccagaaaggcgaaaaaatcctcctggacaccaccgggccaattgcacgcacgaataccagttatgacggaacaaaacgccgtaacccgaataacgtggttgatctgaaaaaccgcaaataccagtgcgaacaggtgaactacgacacgtttatttcgtatccgcagcttgatgcctggtcggcacaccctgattttcagtcccgcatcagcgcacagattgcccgacaggtggcgcttgaccgcatcatgatcggtttcaacggcacgtctcacgcggatgagtccaacttcagcaccaacaagctgcttcaggacgttaacgtgggatggctggagcacatcagaaccgacgccagcgaacgcgttatgaatgacgtgacgctgacctcccgcaacatggacaacaccgtggcgcacgcgggtaagtatgcgaacgctgatgcactggtacaggacgcgcgttcatccctgctggatgaatggcacaaggaagctgacgacctcgtggtgattatggggcgcaatctgtttaactcgctgcgtctgcccgtgctgaacagcatcagcggccagaatcccaatgcggaattacttgccgggcagctcatcctgtcatcgcgcaccattggcgggctgggcgtgttccttgcgccattcttcccggatgcaacgatgctgatcacctcgttcaacaacctgtcgatttactggcagaaaggttcaatgcgtcgtctgatgaaagacgaaccggaatacaaccgcatcgccacctaccagtccatcaatgacgcttatgtcgttgaagactatggcaagtgcgcgatggtcactggcctgaagttcgccgacagctaatcaactcacggcgggaatcatgcccgcctgtaacggagagaaaaaatgattactcctgcacagcaacactggcagaacgtgatggcacagcgcgcaggccgggcgaatgaaggcgtggaccacgccgcgcgtaccgcgcatgaagaggtgctgtatcgtctgcgtctggcacaggcccggcttaagggcgtacaggccagaagcgcgaaagccgccatcaaaaaagagttgttgccggacttttccggctggattgaaggaacgctggaggctgacggcgggcagcaggatgaagtgattgccacgctgatggtgtgggcaattgactgcggcgatcttccgctggcgctgcgtattggtacgtatgtggtccgtcacaacctcatcatgccggataactttggacgtactgccgccacggtactgaccgaagaaatctgtaatccggtactgacgcaggccgggacggatgccgacgcggatttgtccgcctttatcgaaccactggacaccctccgggagattgtcaccgaccaggacatgccggacgaagtgcgcgccaaattatgcaaggcgtgcgcctttgcccgtcgtggcctgaccgatgcggacagcatggcctcatcactgaagctgctgcgcgaagcgatgcacctgaacccgaacgcaggtgtgaaacgcgagattgcaaccctttcccgcgccctgaaaaaagccgattccgcagccgcaccagaagatgccagcacaccgcaggcgcaggacgaaagcagcaaaagtaaaaagacaacgcggaagcctgcaacacgaaaaaccaccgcgacgcagaaggcgaagcgcggttaacgactgaccccgtcagcgggcggcgtgcgcggtgttccggtttgactccgtgaccgtttacaccgcgcacccaccgcccgattttttcaggagtgaaccccatgagtatggttgccagaaccaaccccggccccgcagaggacgacatcaccgataccgatgatggtgatacccgtatttcagcgggcgcattctggccggatattgtgctgcgtgagctgcgtctggcgatacgactgccgggccgtgtgaccacctcccgcctgctgcataccgccaccggggccgtggcacacgttacccgcgagctggaagcgtggcagaaggaacagcaggcggctggccatcagacgctggccgatgttccggcacccgtaattaacggagaaagcgtcaatctctggcactggcgcaatgccgtttataccgccacacgcgccctgattctggagcgttaccgcgatgcggacacaacggataagggcgaccgccgggcggacgcactggatatacagacatcggatttgtggcgcgatgtgagctgggccatctctgacattctgcgccgcccgcgaatttttgcggagctgtgctgatgaaagtgaaggcactggaaggcgacaccgtggattcgctctgtttccggtactacggcacgacgcagggcgtcaccgaaaaggtgctggatgccaaccccggactctgtcagcaggtatttctggacgccgggcaggaagttgagatgccggagccggagaagaagaaacgagaaatgattcagttgtgggggaagtagcagtgagcaccattcaaacagggatcacagagcaggttattgcgtggctctttgaccacctgccaacggtgtatgcagtaggcgcggcggtcagcatttccgcgctgatgagtctttatgacggacgaacactggttcagaccgtaacgggatcgctggcgtgcggcgttcttgccatggccgtggccgggtcgttgcgcttcttcgggtttcctgaagatgccgtgacgtttatcggcgcatcaatcggttttatgggtgcagagaaagcacgcgacaaggttattgcggcctttaatcgcagggtgaaggagaaggacgaatgagcaacacatttaaattcagcagccggagcgaaaagaatttgcagggcgtaaatcctgatctggtgaaagtgacccgacgggcactggaaatctcggaagtggattttggtatcaccgaagggttgcgcagccgttaccgccagaagcaactggtggccacgggtaagagccagaccatgaacagccgccaccttacggggcatgccgtggatgttgtggcttatatcggcagccaggtgtcatgggaatggccgctgtacgaaaaaatcgcagcagcattcagacaggccagccgggaactgaatattccggtggaatggggcggcgactggaagaccctgaaagacggaccgcattttcagttaccacacggagcctatccggcatgaagctctggcccacgctgggcgtcgctttccttctgattgctggatggggaacatccatgcgtctgtcgtggtcgctgggccgggagaacgccagaaacgaagcgcaggccagcaccctgaaaagtaccgccgacaccctgaatattatcagcgccggggtacaggatatgcagcaggtgctggcgcaactccgcgtggaaaatcagcaacgcaatcaggacggagaggtaagacgtgaacagctacgcaacgatattgcaaaagatgaatgcgcccacgctttgcctgacgctcgttttactgacaggctgcgcaggcacgcagaacgcgccacggccagcgccgtcagtccggcttataccgcagacgctgaccataccggtaacgcctccccccttccctgatactcccacatggggaaatctcggtatatggggcgaccgccttctggatgcactggaaacctgtaacgcggataaacgggccattgaattactggaacagcgcaggctgcaacgactgaacaacgaggataacaaccatgctgaaaactgattccctgcgtgaagccatgacccgttcatgccgatggtgtcaggccaacccggaaaaattcaccattttcgtggagagcggcaacattgaaacgaccggagaaaccccatcgtttgtttaccgctatcagatggtgatgtttgtcatggattacgccggggagctggatgacctcacgctgccgctgctggcgtggttatcccaaaatcagccacagttgttgctcaaccctgagcgtaatcaggacatcaaattctccgccgttatcaatgacgatgacagcgccgatctcctgtttacgctccccttgcgggaacgcgttcgcatcacgcgcagcagtcagggcacaccgcaggcagaacacctgccggagccaaaaccccgcctgccatcttccgaaggcgactggtcgcatgtattccaggatgtgacgtggggtgaaagcgatggataaggcattcacccgcgtggatgaaacctttgaggccatccgcgacagcctgaatcagcaggccatcaataacatcgccagaaagctggcacaggatttacgtcgcacccagcaggcacgtatccggtcacagaaagcgccggacgggaccgcatgggcaccacgcagacgccgcgtaacccggatacaggaacgcattcgctttatctggaataacgaagcacgcacgctgaaaaactggcatcacgacacggggaaatacgggcgaaccatcaccgggtgggatgaggataaaaacaacatccgcacgttttaccgggatgacatcgaccgctttctggaaatacgcacccggcgcatcaaccaggacagcacaaagcgcgtccccatgttcgtaaaactgcgcaccgcccgctacctgaaagcccgtgcggatacttccggtgtgacggtgggttacagcggcgtggctgcacgtattgcacgcgttcatcagttcggtgagcgcgatcaggttgcgccgggcattttcaccgattacccggtacgtgagctgttgggcatcagtcaggcagatgaacgcctgatttataacacggtgctgggccggattgcggaggctgtacggtgagcgcagaactcatgcgactgctgagcaatatcatccgcaccgggatcatctctgaagttgatgagaagtcctggcgcgtgcgcgttcgcagcggcgaactggagacaggctggttgcgctggaacaccacgcgcgcgggagccttcaatgtgtggctgccgccatcaccaggcgaacaggtggtaattgcctgcattggcggcaacccggaaaccgccatgataattggcagcctgtggagtgatgccaatccggcccccggcaaaagcctgaaagaaatcgtgatcagcgcgccggacggcgcggtgttccgctacgacgcggacgcaggcgcactgagcgccagcggcatgaaaacggccactttacaggcatccgtcagcgtgacactggacacgcccgtcgtggaatgcacaaaccttctgagaacggcgacgcttgacgtcacaaaagggggaaagatgagcggcaatatcacgcacagcggcggcgatttcacctcaaacggcattaccgtgcatacgcataaacacggtggcgtgaaaggtggcagcgattcgacaggaggcccgcagtgacaacccgctacacaggaatgaacccggacggaacgggaaacctgaacgatatggagcacctgaaacagtcagtcagggacatcctgaccaccccactggcaagccgggttatgcgacgggaatatggcagccttgtgcctgatttgattgacgaacccatgaataacaccacgcgtctgcaatgcatgagtgctgccgtgattgcgctgacacgatgggaaccccgcattgccctggatgccatcgacgttgtctggaaagcgggaggccgcgccggggtgacgctgtcgggcactgtcatgcagaccatgcagaatgttgaattaaccatcacgctgagggagtaaatcatgcccgccgttgacctttcacagttaccggaccccgccatcatcgcggagcctgactttgaggcaattctggctgacacaaaggccatgatgattgcggcttatcccgccgaacagcgtgaagccgtttccgccgcgctggagctggaatcggaaccccttaacgttatcgctcaaaccatgtcgtttcgtgaaatgctgttacgccagcgggttaacgagggggcacgcgcctgcatgttaagccacagcgccgggacagacctggacaacctcgcgggcaatatgaacacaaaacgcctggttatcactccggcaacggataccaccgacgcggtgatggagagcgacacctcgctgagactgcgggcgcagcgggcgtacgacggcctgagtgttgctggcccgtcaggtgcatacgagtattttgcacgcagcgccagcggtctggtgcgtgatgcgcgggctatcagtccgtctccggcaaatgtgacggtttccattctgtccactgaaggcgacggcacagcaacggaggcgttgcttaataccgttcgcgccgttctgaatgcagaggacacccgcccggtggccgaccgcctgaccgtacagagcgccagaatcgtgacatggcggctgaatgcaaaactgtacttttaccctggcccggaatccgaacctattctggctgcggctgaatcgtcgttcaggaagtggctggctgagcaggggcttatcggtcaggacgtggcgttgtccgccattgctgccgcactgcatgtgcatggtgtgcaacgcgtggagataatcgaacccacacagaatatggccatcagcgacatacaggcggcgcgctgtgagtcgttcaccatcagcgaaggtgggcgcaatgagtaattcactgttaccaccatcagccagcagtttcatgcgttgtgccgaagctgtcggaacgcgcattacagacatcccggtagacctcaacacgctgtggtcgccggacacctgcccggtgcacctgctgccttatctcgcctgggcattttccgttgaccgttgggatcgcaactggccggaagaggcaaaacgacaggtgattcgtgatgcatggctgatacaccgacacaaagggaccatcagcgcactgcgcagggccattgagccgctgggatacctcattcgcgtgtctgagtggtgggagttcggcggagaaccgggaacatttaccgttgaagtcggcacactggacagcggcgtgacggaggaaatgtatctggaaatggagcggttgattgctgatgcccgcccggtcagccgccacatgacagggctgaatatcattcaggagatcccgggagatattttcgcggcggcagcaacttacgacggtgaagtcattaccatttatccggacgattaagcatgagtaccacaacacgtaaatttaaaaccgttatcaccaatacgggtgccaaaaaattagctcaggcagccgcgccagatggtaagcctgtccgcctgactcatatggccgtgggtgacggcggcggcactttaccctcgccagacagtaagcagacccgtctggtgcatgaggtgtggcgacacactgttaatcgcgtcttcctggacgcaacacatcagaaccgcattattgcggagctggttgttcctccagaaacgggcggattctggatccgggaaattggtgtgtttgatgagcacggcgatttaatcgcagtaggcaatactgccgaaagttacaagccaaccgttgccgaagggtcaggacgtgcacaaacatttcgcaccattctgaccgtatccagcactgccactatggcgcttaccgtggataacaccatggtaatggccacagtggattacgtggatgacaaactgaaagagcatgaacagtcacgacgtcacccggacgcctcgctgaccgcaaaaggctttgttcaacttagcagcgccactaacagcacatctgaaacgctggctgcgacgccaaaagctgttaaggcggtaatggatgaaacgaacaagaaagcgcccttaaacagtcctgcactgaccggaacgccaacaacgccaactgcgccaaaagggactaataatactcagatcgcaagcacggcttatgtgatggccgcgattgccgcacttgtagactcgtcgcctgacgcactgaatacgttgaacgagttagcggcggcgctgggaaacgacccgaattttgcgaccaccatgactaaagcgcttgcgggtaagcaaccgaaagatgccaccctgacggcgctggccgggcttgctactgcggcagacaagtttccgtattttacggggaatgatgtcgccagcctggcaaccctgacaaaagtcgggcgggatattcttgcgaaatcgaccgttgccgctgttatcgaatacctcggtttacaggaaacggtaaacagggccaggaacgccgtgcaaaagaatggcgataccttgtccggtgggcttacttttgaaaacgactcaatccttgcctggattcgaaatactgactgggcgaagattggatttaaaaatgatgccgacagcgatactgattcatacatgtggtttgaaacaggcgacaacggcaatgaatatttcaaatggagaagcaaacaaagcaccacaacaaaagacctgatgaatcttaaatgggatgctttgtctgttcttgttaaagcccttttcagcagtgaagtaaaaatatcgacagtcaatgcactgaggatatttaattcatcttttggtgccatttttcgccgttctgaagaatgcctgcatatcatccctacacgagagaatgagggggaaaatggcgatatagggccgctacgcccctttacgcttaatctcagaactggtcgcataaatatggggcatggtctggatgttacaggagatataacaactaacgcatgggtgtacgcaaaccgccttgcaattaacagcagcacaggcatgtggattcatatgcgtgaccagaatgttatttttggacgtaatgcggtatccactgatggtgctcaggctttgctccgtcaggaccatgccgaccgcaaatttatgattggcggtctgggaaataagcaatttggcatctacatgattaataactcaaggacagccaatggcaccgatggtcaggcgtacatggacaataacggtaactggctttgcggtgcgcaaattattcccggaaattatggcaattttgactcacgctatgtgagagatgtccgacttggcacacgtgttgttcaattgatggcgcgtggagggcgttatgaaatagccggacacgcacttaccggattaaggattattggtgaagttgatggcgatgatgaagctatcttcaggccgatacaaaaatacatcaatggcatatggtataacgtcgcacaggtgtaaattatgcagcatttaaaaaatattaagtctggaaatccaaaaacaaaagaacaatatcagctaacaaagaattttgatgttatctggttatggtccgaagacggaaaaaactggtatgaggaagtgaaaaactttcagccagacacaataaagattgtttacgatgcaaataatattattgtcgccatcaccaaagatgcctccacgcttaaccctgaaggttatagcgtcgttgaggttcctgatattacagctaatcgtcgtgctgatgattccggtaagtggatgtttaaggacggagctgtggttaaacggatttatacggcagacgagcaacaacaacaggccgaatcacaaaaggccgcgttactttccgaagcagaaaacgttattcagccactggaacgcgctgtcaggctgaatatggcgacggatgaggaacgcgcacgactggagtcatgggaacgctatagtgttctggtcagccgtgtggatacggcaaatcctgaatggccacaaaagcctgaataaaaattaaggcccgatagcgggccttgtttcattctggttgttctggaaacgttactggcaggctggaggtgtctgtggattcgaccttctgcgcatagagcatccactcggttaatttttgtttattctcgtcggaaatgatacccagccgtagctgtgagtcccatagctgggttttatccctgacaagttgcaacaggctttgcttttcattctctgcctgctgcctctgttcctcctcggtataagttcgctttatcactacgccatctttgaacatccatttacccgaaatatcagcccggcgatttgctgtaatatcaggtaattcaacgacgcttgcgccttccggattaattgctgaaacatccttttcaatacaaataataacgccgttatggtcatagaccattttcaaagtgtctggctggaaattcttttgttcctcataccagttttttccatcatctgaataaagccatttgatgttaaattgctttgttagctggtattgctcttttgttttagggttgccagcagtaatgttttttaagtgcatcatcgttaaatactccccgcgttataccacgtcccattaatgcaatactgaattggccttgcctgagttgtatcaattaattcatcacggtttccgttaactgaacccgtaacgacataacctgacctgtcagaccagccggggccattccatgtctgaacagatgacagaccgccaaggcgaatacctgtaataaaccttgagttacattctgcctgcgtgtatgcaccaacatctcccgcagagggtttgcgggtcgtggtgtaaaactctgaccagttagcctcaaatccataaccatcacgcgctgaacgataaaaaataccgccgttcctgtaattcacgcggaactgtacagcagggcagctccccgtattcatattgaagtggaggattaatgtcgatgcaccgctgatatctgcatcataaacaccgctattccagttccagccaacagctttatcatttgcaaccctgcttcctgtttgccctaaagcaaatgcaggctgctggtttttcgtgttgtagtctcgtcgccagccgggggcataagcatcaccatgatcaatataagtgaattgagcgttagtaattccgccaccgctggacgtgctcggcgtggtaacgcgtatggtcattgcgccgcgggttcccataacctcaatcacggctccggcaaggcagatatttccacaaccggtatccgtaataaccctgtttctggcataggaccatgaccctttacacatccagtatggatgtcggaaagctccgttattctccagccacgagataaatgcaactgtcgaccatgcaccttgtgaaccatcgatatcagtctgaccgctaaatgcacgacaggcccctgtgttttgtatgaatttatctttattcggaatatctgcaccgttctgttttttctgtaatgcaccagaagcctgatttaccgtttcctgtaaaccgaggttttagataatggccgtttctggcctgcatggcatgatttgcgcttttggacgggagattcagtgtgctgattggctatgtaagggtatcaacaaatgaccagaatacagacctgcaacgaaacgctcttgtttgtgcaggatgtgaacagatatttgaagataaattaagcgggacaaagacagaccgaccgggattaaaacgcgctttaaagcgccttcaaaaaggtgacacgctggttgtctggaaactggatcgcctcgggcgaagcatgaaacatctgatttctctcgtcggggaactacgggagcgagggattaattttcgcagtctgaccgacagcatagatacatcttctccaatggggcgttttttcttccacgtgatgggtgccctggctgaaatggaacgtgaattaattgttgaacgtacactggccggactggcagcagcgcgcgcacgggggcgcacaggcggacgtcgcccgaagctgacaaaagaacagcatgagcaaatagcaaggctgattaaaaacggtcacgacagaaaacaactggcaataatttacggcattggtacatcgacgatttatcgttaccaccccgcaggagaatcaagcggaacaatagagaagagtcagaaaacaaaataaccgctaatctgaccattagcggtttttgtgttaaatcagaacagccctttaactgaactggccgcgctgttaagggatgatgtcaccttatctttgaagccggacagcatatcgctgaacgatgaggattgcaggcgctcccgcaaatcctcatcacagcgttcaagggtcagtgaaaattctatctttttcgccttaccgtagcgatcaaactcggaacgggtcgtattcgttccgtcagtacatacatgccgtaaatctgtccgacgccatcaatcagaggccaggggcgtcctgtatacgcctgcgtggtcagcagcgacagcgacacttcgccacctgtgatttcaggataaagcacaccagaaagcacgatgcgatcatcgcctgccccgatatactgccagcttgctgaacggttaacgcgttcatttttcacatgccgccagcttttattttgctgtaactgctgatgcggcaatgtgcgcagctcaaaaacaaacatgccgtagatcatcatcatggccatgactcctcaatctttatcgtaaaaactgccacgtccggcacggtcgcgtcgttccaattctgccctgaccatttcaccgaccagtttcgccagttcgcggggattctgtgtaacaacgttatgcagatgaacatgaatttcaccgccaaatccggaggcaacaggctcccggttacgggaagttgcaggaactgatgccactggcgatcgtatggcctctgccaccgggcgagagctggccgcaacaacagggaccagcgccggaggcagcggagccggaaccacaggtgtgatattaattgcgggggcaggcttactgacctgcgcaatcttccgctcctgccactccccacgaacggcaagtgcgcggggcaggttcttaaagacaatatcgccggggccaatacgttttttcgtctcatcaaccagcttacctgtgttatcagcaattttgctgagtctgcgtagcgtaccggtattgctgtctgtgagcggtttgttgtctttaggtttatcacctccggtgccattgccattttccacaggcttcggcggattgattttcgccaggtccccctgaagcaaggcaaccttgtcctgaagaatggccgcacgctgtgcgtcttcgattttcttgcgcgccctttccgcttcatccggaagcacaccgagcttttcaagtatccacgccagcgtatccagcaacatttttgcaggtgtcagaacaagttgtaacgcaccgccaagaacgttaccgaatatctcgccagcactggtacatttatccagcgtttccttgctggactccatcggtgacagcagcgatttaaaccagttaaacacctggctgatcccactcccgattgcgtcaaaaacaggaccaaaccgttcaaaggtttcgcgcaacggggtcagcctttccataatcccgctgaacaccccggcaaaaaatgccctgatgggatcccagtatttccagataagaacggcagctccggcaagcgcagccacgataagaccaaccggactgaacaacgccccgatagcgcctcccagtaaagaaacggaacccgtcaccattccccatagtgctggcaggaccctgacagcattcattgatccggtcaggagagaaaaaccaagacgcagttttgccagcgggccagcaagcacaccaatagctagcgacaacgagccaaccgttgcagtcattgccagcaacgcaccgcctgctatcagtagctggcgcgtcagtgtcggatgggcctgcgccagcgccgtcacccttgataccacacgcgtgagccactgcgtgacagaacgcagcggaccgtcaatcagatctgcaatgcggatgcgcaacccttcccatgcactgctgagtgatttcagatcgccgtcaaggttgttggccataacctttgccgtgcgttcagcctcaccgcgcgcgccttcaagttcttttctcagtttgggtaaggagccgtcacctgccgcatcaacgagggccataaatgatgtgaaagcctcttctccggcaatgtccttaaagaacgatacccggtcaacttccccgtatttgcgggtagctttataaaggtcagccagcacatcctccatcgggcgcattttgcccccggcatccgagacagacacgccaagctctttcagcgcctctgctgccgcctttggcggtgatgccagacgagccaggctggcacgcattgccgtcccggcatcactccctctgatacccatattcgccagcacgcccgccatcgctgcggcctgctccagcgatattcccagcttacccgccaccggacctgcatatttcatggtttcgcccagcgcgcgaaggtcagtgttagtacgggtaaacgctgctgtaagcgtgtcaccgacccggtccatctggtcagcggagaggccgaactgcgtcaggatatttgagccaatatccgccgtctcgccaaggtccataccgccagccgttgccatgctcagcacgcccggaagcgcagcctgaatggcctgcggtgtgaagccagccattgcaagaaatgcctgcccactggcggcatcgcctgcggtgaactgcgtttcagagccaagttttaacgcctgctcacgcagcgccttaaactgcgggctgtttttgtcgattcgcgtcagtgcctgaacgcgggacatctctttcccgaacccgatcgaggctgcaaaaaacgcccggcagcatagccgcccgccgctgccgcaccaattgccagcgcaccacctgttttcagttttcccgctgtttcctgcgcgcgcgaataccgctcacgcgcccgcgttacacgcgcaagcgcctgccgttcgcgttcaagctggttgttgtatgttcggtgcgtctgatggcctgctggatggtgttatcgctgcctgtcagggaaatgccgtggcgtttcagctctccgccaagctcccgcattttctgaatttcccgtgtgcgcgattcattcaggcgttcaagccgggtgcttaactgctgcatcagcttttgttgtttttcgctgagcactgtacccgtgcgttgtaactgattaagggcgttaagctggcgtcgtgctttcacgatacccgcatccgctttactgacagcgtcgcgggcgcgctcaaatgaacgcgcctgacgctcgagatttttgatcgccccctgcgttcgctggatggagtcaccaaactgccccatcaggcggcgtgcgttttcggcaggtcgggtcagcctgtcaacggcgctgaaagcgacccggatatcaagagtcttcattgtctgcattcccgctgcgaagtgccgcccgctcacgccagctaaccacttcgccgggcgtcatcatgaagatttcggcgggcgaccagttaaaaataacggcaatatctgccacaaagtcttctatgtgctcaaagcacacaaccgtgatcaggcttccgtcgcctgttcgttcttcccgccagagtccgcaccgctcaaaaaatttacggcaaccacacataactgaataaagtcacgggatgccatttttttgatcgtcacttcatccagtcgcggtgatgtcacgcgtgacagcagcgtaaacatggattccgctttcagactcagcacatcagacagcgacaaatctcgcagagatccagcctgctcaatagccccggtgatctccacatacgtgattttttcgccgcttcgctcaattggttgggtaagttttacgccacgctcactggtttctttcacagtgtcagtaactaccgtgttttcggtatcgatgtttttcgtctctttcatcaggaaactcctttcagtcagaggcgacgcactgcgccgcctgcatattacttatcagccaagcccaagcgcggaacggatgcgatcgggcacaatgtccttgccgtccttccggtaaatgaagttcagcaagtcaatctcccacaacgggcgatcgttaacactcagcttgtagtaggtgtttttaatggcataagtgtgtgatgtggcttcgccctgtttggcttcccccatatcaatttccgtcacacgtccgcgcatttcgacttcatacaggtcgctttctgcatcggtgtagtattcacccgcaaaacgcagcagcgtgccgtcaatcgtgccgccatacttcaggaacagctcacgaactgcgccccccatgacaaagctcgcatcaagcgcggagtcgtccaggccgagatcaatacttaccgcacccatcatgccaccaccccggtagctgtcggttttgcgcgtcagtttaggcagggtgacggacgtcaccttacccacttcgttttcaccatccacaaacagcgtaaaaaagcgaagatgttttggtacagccatcaggcacctcccagcaccgcaaatgcgggaccaaagaattcatcagtaaacgactggtaaagctccatgtcttccagcggaggaacgggcgtatatttgtagcgaatacgcacacgcccctgacgtaaattcgtggtgctgttatccacgatgtcataccagcactccgcgccaatcagtttcccggcagtaaccagtgaatccagttttgccctgatggcactgataacatccttcacgttcgcaggcgtcagtggactatcgatggtttcaaactgcgcttccgcaattgaatcagccagcacctgtgcggttcgggtatacacctcaaagatgtaggcgttcgtttccggtgtgcggttgccccagaagcggaacccgttgcgacgaataatggtcgtgatttctttgttgttgaggctgttggcatcactgtcttcggcctgcaacgaccagaacacatgcctcgacatccccagcacattcttaaccggaacgttggagagtgatttgtgccatccctgctcatggtcaatgtacgcacgaaggccgcacgcataggcaggcgcggggaacgtttcgtttttgccacttttcgggttgtaggcgatgaagtccggccataagagcatcacctcacgttcgttgaatttctggcggtaggtaatcgcatcagccatcgtgtcacagccatgacatgaggcatacacaaacgcgcgcagtttacccgcaatcacgcacagggattttgtcaccgcctccgtatccagctccggcgcggccagaatacgcggacggtatccgatgctttcatcctgctctgcaacaagcagcgcatacatccccgtatagctgccgtcagattcagaaccaccgataaccagttgatcctgcgtttttccgtcttcttctttgtgttcagccacgcgaacgacgatcacctttgtgctcacctggtctgcgatggccttaagcgcacgataaagcgtccccgttgttccgcattttcccagcacgtcattgacgcgggtcagcagtgtgggcttgttcagcgggaacagctccgcgtccgcatcatccgccgttgccacgataccgataacactggaatcaacatcattaatcgctgttaccaggtcggtactttccgtaacacgggcaccatgaaaacgagtttcactcatagcttcagccccttgtatccgttaaatgattcggcaacaatcatcacccaccacgcgcgtaatctcactcctgcgccgttctcccgccacggcgacaacaaaaagcagtaaccccctccgcacgcacatgcgaccatgccgcacagggagggaacagatgaccgacaccaccatgcaattgctcagtcagggcacagaccccgtgaaaatgccggattttgatattctcgcggagggtaaaacgctgtcaggcgtggcagagcgcctgatgagcctgtcactgaccgacaaccggggatttgaagcggaccagctcaccatcacgctggatgatgcggatggtcagttgcagctaccgccacggagcgcgcgcctgacggttctcattggctggaaaggagaaccgctgacagaaaaaggcacttacattgttgatgaaatcgctcacgaaggaccgccggacaggctgactgtttcagccagaagcgcagattttcgggatgaatttaacgttaaacgtgaggtgtcctggcatgatgtgaccgttgagcgtgtggtatccgccatcgctcatcggtacggtctgaaaccgcaaatcagcgaaatgctgatggatatcgaaatcgaccacgccgaccagaccgaagaaagcgacatgtccttccttacgcgcatggcggaaatgctgggcgcaatcaccacggtaaaaagcggcaatctgttattcatcatgccaggtggtggcgtgaacgcacagggccagccgttgccctcgttcgccattacacgcagcagtggcgatcgccatcagttccgcattgctgaccgcgaggcgtatacgggtgtacgcgcctactggcttgatcttaattacgggaaaaagaaaaaagtcagcgtgaaacgccgcaaaccgccaaaacccaaaaaggagaaaagcagcagccgtgaaggtgattatatggaaggcgcggaaggcaatgtgtttgtgttacgcaagacttatcagaacgagcaggcagcaagacgcgcagcggcggcaaagtggcagcagctacaacgcggagccgcatcattctccatcatgctggcacgcggacgcgcagaactctaccccgaaatgcatggcacggtaacaggctttaaaagcgagattgataatcaggactggattattgcaaaagccgagcacaccattgataacagcggctttaccacacagcttgagcttgaggcaaaaatcccggaatggatagcagaaacagagtgagcaacttagacatattagctcagacttaaactggcaagtttacagtatagaattaaacataaacgacggtccgctccgtgtcagaagcggactttgtcatccctatgtaaggttgattgcttaatacgcatttaatttaaatttgtatttgccttctatgtaatggataaattcaattatgcttttttctatcgcatctaatatatgaatatatccatcccgatttaaggtcctatccaactcaaagtgatgaactatcccatgtctatattgtatgatttcagaaattcgattctcaagaaaatcaactgattttccaattctttttttcttataaagaatcgctctcacatctatatccagccactctttatatgctttgtttaggtgggttaagttttgaaaagtgtaatttcttgcaataacactttctattgaaatatttcctttctctatctcaagcagaatatcaaaatcaactttttgcttatacgatgttctttttgctattgcgaaaggatcgtactttataagtatttgaaaagctctagagaaaaaatattcaaacatagcaaccgcaaaaggtactaatccattatatataactctactgggatccatacattgcatgtaatcaaagtattcggataagccgccatcttccggtaggtttaatttaatagaaggttcaggtaaggcatgtttaacagcggaaatctcatgatggacatgattaaatattgaagaaatgccacgactgatcggactactagaatccttccatagaggagcgtacctatttttcccataatcacctataagtgttccaccaaaaagactccgtgcgccttttagaacatcattaagcatttttacatcatgccaactagcgctatataaattacgcacatgcaatgcccatttattaccagatatgtgtaattcgtcatttgaaacaggatatatatcagccgaaactccatctgtagatttgaagtccgtatcatcaaaccaagagtaattcaacgttccttggggccattcccacaaatgtttacaccttttaaaacctaaattttcaaggtaatttttaagttcgtttctagttgcttttttagggtacagcattatatctcttcccatgctttattcacctgatatacaatattttaaattttaactattatgaacgtatgaattttcacattggatgtatggaagttcaacaactattgaaagttcaattttcactcttcgcacagagcgagctgttagttggaattagggatcgtacaatctagaatagcggcaacaccacgttaagggaggtcgctatgttccgttgtccgctttgtggcgcatctgcccgtatccgcacaagtcgtccggaaaatgattcaaacaccgtgcggcaaaagtattaccagtgtaacaatctggaatgcggcgtatgcttctcaacactggaagctttccataaattcacatcgaaacacgcctccggcgttcactcttcagaaggtatcccgtggcatgagctaccagcttcacacaggggaaacaatcagatgagtttgcctttacctaagaattaacaagcagaattgccggagtaacaaaaaagcgatagattacgcgcgggtgcctttcggctgatggtcggagggaatacccgaaggccagatgtggaaaggccccggaaaacacttttgtttaaccgaggccctaaccgtctaccctaagcaagtgaaaggttagcgcctctccggaaaaggagcaagtgctatgtcgcaaaaatcgcttacagccatcacgttctgcgtgacggtaatcctcatcatctggatgttgcacggttcgctgtgcgaaatacggatgagtttctggggagcggagtttgcggcgttcttacagtgtaagcagtaaggaaaccgcgacgggggagtaatcccccgtcaatcggttgccagggtaaggtcgataaggcaccctatctcacggctctaaatgcaaaaattccatgaaactgtgggatttttgcatcactactgatacagatctgaccttctttatgtctcactctataccagctaatcaattgacacttatcaataaaaaaaaatctgataaaatcaaaatgttttgtaacaaatatcaactcgtattgatccaaaggaggcggattacatggcattaatcaaatgtcctgaatgccagaaagaggtgagcgattcagcattgtattgccctgcttgcggtaaacaaataaaaaaaattaagcgttcattttttggaaagctcattaagtggatttttatattatttaatatttttatgatctatacgcttttagttggactgggaggcactagtgaaataataaataatgctacatccgatgccgaaaaagccggtgcagttattggtacaggcttaggtttaattaccattggaagtttatgggttattggcgatatcattatcggaattttagtgtttcttactaaaccaaaaggataacaaaatgaaaaatataattttttctataggtgcatcatttatatcaattagtgtactgcctgttcacgcagcaactgaacataataacttcaatgcagtactccagtgccgagcaatagaaaataataaagacagactttcttgttacgataagtcaatacaaccgactcgaacgaaagttgctgaaaaattcgaaagcagagatcaatgccctgatgagaaagatgatgacagacgtttatcttgttatgatcgttttttttctccaacatttactccatctgtaaactcaaaatctaaaacggaaaagccagtaacaacagaggctcagcaaccaaatctttctgagatatctaaatgccgagcagaaaatgataaagaagccagactaaactgctacgataaactattcccacaggataaagctgttcaagctgaatcaaaattagagaaagccacagatgtaggaaaatggcacacatccattactacatcgccaattgatgattcgaaaaatgtaattttatcgttagaaagtgatgattatatcagaactccatttggagaagcggttactcctactctgtttatagcttgccgagaaaagaaaaccgaagtatttcttagttgggatgtatatttaggccttgaacaaaccagcatgctttatcgtcttgataaacagaaagcagttgagcgaaactggctagtatctacagatacaaaggctgttttttataaaggtaatgacattgatttcatccgaaaactagccaactcaaacaaaatgtatacaaaaataactccttataatgagagccctgtaagtgcaactttcaatttaaacggcctgtcaaacgcgctaaaaccacttcaagctgcttgtaactggaaatagcataaatcatgtggcttagccacaatcacagataacacaaagcccgtgaaaacgggctttgtgttatctgtaactcgaaaatgtggtcactacgtggacacgtgctgatataaatccttttatatcaataaattaaatcatcatttttttcatcaacaaggattttcacgtttgtgttacctgtatgagacgagagttaaccggacaagtgtgccataatctcgcggccaggcatacttgcgaagatttcaggtataaggatacgtaatgatacaacctatttccggccctcctcctgggcaaccaccaggtcagggagataatctgccgtctggcacgggcaatcagcctttatccagtcagcaacgtacttcgctggaaagcttaatgacgaaagtgacctcactgacgcaacagcaaagagcagaactgtgggcgggtatcaggcacgatattggtctgtcgggagattcaccgctgctttcgcgtcacttccctgccgctgagcataatctggcgcaacgtctgctggccgcgcaaaaaagccattctgcccgccagcttttagcgcaattaggggagtatttacgtctggggaataatcgtcaggcggtcacggattatatccgtcataactttggtcagacgccgctgaatcagctctcaccggagcaattaaaaaccattctcaccctgttgcaggaagggaagatggttattccgcaaccacagcagcgcgaggcgaccgaccgtcctttattaccggcggagcacaatgcgctaaaacagctggtgaccaaacttgcggcggcaacgggggaacccagcaaacagatctggcaatcgatgctggaactttccggggtgaaagatggcgagttaattccagcgaaactgtttaaccatctggtgacctggctacaggcgcgtcagacgctaagccagcaaaatacgccgacgctggaatcactacagatgacgctaaaacaacctttagatgccagtgaactggcggcgttatcggcatatatccagcaaaaatatggtctttctgcgcaatcatcgctttcttctgcccaggccgaggatattcttaatcagctttatcaacggcgggttaaagggattgatccgcgtgttatgcaaccgctgcttaatccttttccaccgatgatggacacgttgcaaaatatggcaacgcgtcccgcgctgtggatactgttagtcgcgattatcctgatgctggtctggctggttcgttaaccccgacgaaatgacagtatcgtgacaataatacccagcaccgcagagatcgccccggcaagaaataccgaagagtaaccaaacgtggtcgccagcattcccgccagcggcccggagacgccgagggcgatatcctgaaacgcggcgtaaccgcccagtgcggtgccgcgaacttgtgaggggacgcgtttaaccacctccacgcccagcgcaggaaagataagcgaacatccggctccggttaacgccgcgcccgctaatgcgacccatgcacctggggcttgccagagcagcaacaagcccaccgtttctacaagcagagagacaatcgccactttcacgccgccaaaacggtccggcatccagccaaacatgacgcgcatcacgacaaatgcgccgccaaacgcggtaagagtaaagcccgccatcgcccatcctttgctggcaaagtagagcgaaacgaaagtcccgataacagcaaaaccaacgccttgtagtgccagacctaaccctggtttccagataagcccgacaacgctccacagcgatggacgttctcccgccagggccggtactttgcgcactgtgccgttacaggcccacgccagtacgggtaataccattgtggtgatcgccagtgcggcaaaaccgtaatggctatgaatcaacaggccaagcggagcaccaacagcgagggcaccgtaaatcgccattccgttccatgacatcactttgccagagtgttttggccctacgatgcctagtccccaggtcagagcgcctgtcagtaactggctttcaccaaagccaagaatcaaacgcccgacgaccaacagagcaaatttgaacggtgcggagacaggcaaaatcgccgccagcagcaacgcgccgccagccagaccacaagctaacattccctgaagcgccgaacgttttgcaccatattgatcggccagtcgcccggcgtaaccacgcgtcagcaccgtagccagaaactgaatcccgacggcaatgccgaccatggtattgccatagcccagttcatgatgaacaaacagcgggataaccggcaacggcaaccctacggtcatgtaggtgagaaaaaccgcaaaagcgatgcggaagagcgaaaaattggcagaagatcgtgtttcggtttggcttacagcagtcatgcattactccagaatgcagcgcaaggcgaggagtatccccgtctcatctctctggtttcagggttacggtgcgttggcaggatttaacgcgtacgtcttttcagaaggaaatcgacaaagcgggaagtttgcctggaactggcggcgattgtcaatgatgtgaaaaagggaaccatcaggttcccttttgcgttagtgccggaggccgcattggcgcgtaacgtcggatgcgacgctggcgcgtctactccgacctactgcgaattaatctttcagcttgcgcattaccagcgtggcgttggtgccgccgaagccgaagctgttagacataacggtggtcagttcgcgatcggtcgtttcggtcacgatgttcagacccgcagcctgctcgtccagctcttcaatgttgatgctcggggcgataaagccgtgttccagcatcagcagagagtagatagcttcctgtacgccagcagcgcccagagagtgaccggtcatggctttggttgcagaaatcgccgggctcttatcgccgaacacttcacggatagctgccagctctttcacgtcgccaaccggagtcgaagtaccgtgggagttcaggtaatcgattggggtatcaacgccatgcatcgccatcttcatgcagcgtactgcgccttcgccagacggagcaaccatgtctgcaccatcagaggttgcgccgtagccaacgatttcagcatagatgtgagcaccacgcgccagcgcgtgttccagctcttcaaccactaccataccgccgccgccagcgataacgaaaccgtcacggtgagcgtcgtaagtacgggaggctttttccggggtgtcgttgtatttagtagacagcgcacccattgcgtcgaattcgcaagccatttcccagcacagctcttcgccgccgccagcaaacacgatgtcctgtttgcccagttggatctgctctactgcgttaccgatacagtgtgcggaagtcgcacacgcggagctgatggagtagttaacgccatgaattttaaacggggtggcgaggcaggcagaaacgccggatgccatcgctttggtgaccacatacgggccaaccgctttcaggccgcgcgggccgcgcattgcgtcagcgccgaacacctggaaacgcggggagccgccgccggaacctgcaatcaggccaacgcgcgggttattctggtaagcttccggagagaggcccgcatcagcgattgcctgctccatagaaaggaatgcataaatggatgcgtcgctcataaaacgcacaactttgcggtcaatgaggccagtggtatccagttttacgttgccccagacgtggctacgcatgccggaatccttcagctcctgagagaaagtgatccctgaacgtccttcacgcagagatgccaggacttcctgctggttattaccgatgctggaaacaatgcccaggccagtaatcactgcacgtttcattcaatacctctgtaagtcgcacatagagtaagtttcgaatgcacaatagcgtacacttgtacgccgaacaagtccgatcagccatttaatagagaaatttgcgcagccttacacacatcgctaagatcgagccaccgcctgtaagacgagtaacttacgtgaaacactactccatacaacctgccaacctcgaatttaatgctgagggtacacctgtttcccgagattttgacgatgtctatttttccaacgataacgggctggaagagacgcgttatgtttttctgggaggcaaccaattagaggtacgctttcctgagcatccacatcctctgtttgtggtagcagagagcggcttcggcaccggattaaacttcctgacgctatggcaggcatttgatcagtttcgcgaagcgcatccgcaagcgcaattacaacgcttacatttcattagttttgagaaatttcccctcacccgtgcggatttagccttagcgcatcaacactggccggaactggctccgtgggcagaacaacttcaggcgcagtggccaatgcccttgcccggttgccatcgtttattgctcgatgaaggccgcgtgacgctggatttatggtttggcgatattaacgaactgaccagccaactggacgattcgctaaatcaaaaagtagatgcctggtttctggacggctttgcgccagcgaaaaacccggatatgtggacgcaaaatctgtttaacgccatggcaaggttggcgcgtccgggcggcacgctggcgacatttacgtctgccggttttgtccgccgcggtttgcaggacgccggattcacgatgcaaaaacgtaagggctttgggcgcaaacgggaaatgctttgcggggtgatggaacagacattaccgctcccctgctccgcgccgtggtttaaccgcacgggcagcagcaaacgggaagcggcgattatcggcggtggtattgccagcgcgttgttgtcgctggcgctattacggcgcggctggcaggtaacgctttattgcgcggatgaggcccccgcactgggtgcttccggcaatcgccagggggcgctgtatccgttattaagcaaacacgatgaggcgctaaaccgctttttctctaatgcgtttacttttgctcgtcggttttacgaccaattacccgttaaatttgatcatgactggtgcggcgtcacgcagttaggctgggatgagaaaagccagcataaaatcgcacagatgttgtcaatggatttacccgcagaactggctgtagccgttgaggcaaatgcggttgaacaaattacgggcgttgcgacaaattgcagcggcattacttatccgcaaggtggttggctgtgcccagcagaactgacccgtaatgtgctggaactggcgcaacagcagggtttgcagatttattatcaatatcagttacagaatttatcccgtaaggatgactgttggttgttgaattttgcaggagatcagcaagcaacacacagcgtagtggtactggcgaacgggcatcaaatcagccgattcagccaaacgtcgactctcccggtgtattcggttgccgggcaggtcagccatattccgacaacgccggaattggcagagctgaagcaggtgctgtgctatgacggttatctcacgccacaaaatccggcgaatcaacatcattgtattggtgccagttatcatcgcggcagcgaagatacggcgtacagtgaggacgatcagcagcagaatcgccagcggttgattgattgtttcccgcaggcacagtgggcaaaagaggttgatgtcagtgataaagaggcgcgctgcggtgtgcgttgtgccacccgcgatcatctgccaatggtaggcaatgttcccgattatgaggcaacactcgtggaatatgcgtcgttggcggagcagaaagatgaggcggtaagcgcgccggtttttgacgatctctttatgtttgcggctttaggttctcgcggtttgtgttctgccccgctgtgtgccgagattctggcggcgcagatgagcgacgaaccgattccgatggatgccagtacgctggcggcgttaaacccgaatcggttatgggtgcggaaattgttgaagggtaaagcggttaaggcggggtaatctgctctcgcagtgtttgccggatgcggcgtgaacgccttatccgacctacgtgtgacgtgtaggcctgataagacgcgataagcgtcgcatcaggcatgctgctccagacgccgcaacttactgctgtgacgcctgctgaaacaggttttcccacatatcggtcaccagcgcctggtcacgcggcgacaattcaccagcaccaatggctttttccagactctggctaacggtcgtatgcaccgcctgagcggagtggtcatcaccactttccagttctgcgatggctaatgtcaggtggccacgcaaatacccactggcaaacaactcatcatcactggcatggtcaaccataccgtcgattaatgccagaatgcgtgattcaaactccgcgatcatcttctttcctcattgtaaaacgtggcgctggcttcagttgagcgcttccggccacgggaactgttccgccgtaagttccggcgtgtgataataattttgtagtgctttaatgaagcgtgccggacgttccggaatgccatttgtcagataatccatcacctgcgcatgtactcgccgttgaaacaccacacgatccggttcgaaatccccttccagattgtcgcaactgacgttaaacggatatcccgccgccacacagaacaaccagtcgagcgcctgcggcttcacttcaacatcttcaaactggctttgcgtttgggcatcgcgtccgtccgggcaataccagtagccgaaatcaaccagctcacggcgcgctttcccggcaatacaccagtgcgaaatctcatgaattgcgctggcataaaagccatgagcaaagacgattcggttatacggtacttccgcatcagcaggaagatagatcggttcgtcgtcgcctttaatcagacgggtattaaaatcatcggcaaagcagctattaaaaatttcaatcaactgctcgtagtggtgtgtactgttcattagttcatccccaaccagtggaggatctcctgtccgtggctgtcgtaaagtaatttggcactcatcaccgccgagacgataacaatcatcgggcggatcagcttttgtcctttgctcaacaccagtcgtgaacccatgcgcgcgccgaggaactgccccaccagcatgacaaagcccgtcgcccaaatcactttgccgccgagaataaacagcagtaaaccgccgatgtttgacgttgcgttgagtaatttggcgtgagccgtggctttggcgaggttaaatccgcacagcgtaacgaaggccagcgcgtaaaacgacccggcagccgggccaaagaatccatcataaaaaccgacgcagccaccggctattaacgcgaagggtaaaccgtacatccggcgctggcggtcttcttcacctagctttggcatcagcaagaaatagaggccgatacaaattaccagaatgggcaaaatctgccgtaagacatcagcctgaacgtattgcaccagcagtgcgccgctcattgagccgacaaaggtcatggcgatattgagtttctgatcgcttaaactaaccactttgcggcgaataaagtagatagtagcggaaatagagccgccgcaggcttgcagtttattggttgccagcgcattagcgggagacatccccgctgccatcaatgccggaatggtgagtaacccaccgccaccggcaatcgagtcgataaatcccgccagcatggcgacaaaaaagagaactcccagcaacagcggggaaaccataaacaggctattaaacgtttccattagatcacgtgctcatccagtagcgcctggcaggaaggcggcaacggaggcggtgtcttcttctcaggctttgttgttcccggttttggaggttcaaaccagctttgcagttctgccccgcaaccatcgcctgatggcggtaaaggttgatcttcacactccagactatcggcagggcaacgtaatcgtacatgcatatgcgcgcgatgctggaaccagggtcgcactttgcgcaaccagtcgcgatcggtgcccgcatcaaggcaaagttgttgtttaatcgccggattaacaaaaatgcgcgtgacgtctttgtcctgggcggcgagtttgatcaagctgaaaatttctggcttccacagcgtggagacaacgtgtttaccgtcgcgggaaactaagtccagtgcttgcgggcgcaagagctgcgcggaggtccagcgagttttcggcagttgcagaaagatatcgacatccagtccggtctggtggctggcatgaccgccgttgaaacgcccaccagcgggcatccccatatcgccaatcagcaccgtacccatgcccagattgctcacctggctactcagacgctggataaacatcaccagatccgggtgaccgaaatagcgacgctgatcggtacgcatgacctgataatgttcggactgtatcggcagcgtgtcagcgccgacaatacagccattagaaaaactgcctatcgattgtgcgctacccggcacaggttgggttattttttgccacggcgtcgctgccaggctggcgctactggcaagcagagccagcagcgcaatcgcggttttattcattttttaccagcgtggaatatcagtcttcacatcggcattttgcgcccgttgccgtaacaggtgatccattaaaacgatcgccagcatcgcttctgcgatcggcactgcgcggatcccgacacagggatcgtgacggcctttggtgatcatctcaacttcttcgccaaagcggttaatggtacgacccggcacggtaatgctggaggtcggtttcagcgccatatgggcaatgatttgctgcccgctgctgataccgccgagaatgccgcccgcatggttgctctggaaaccgtctttggtgatttcatcgcggttctggctgccgcgcagcgccaccacgtcaaagccgtcgccaatttccacgcctttcaccgcgttgatgctcatcagcgcatgggcgatgtcagcatccaggcggtcaaagaccggctcgccaagtccggcaggaacgccactggcaacaacggtgactttagcgccgatggagtcgccctcttttttcagcgcacgcatcaactcgtctaacgcgtcgattttgtcggggtccgggcaaaaaaacggattttgctcgacctgcgaccagtctttgatatccagcggaatgtcgcccatctgggtcaggcagccacggatttcaataccaaatttctcggcgagatattttttggcaatagctcctgccgccacgcgcatggcggtttcgcgggcggaagaacgtccaccgccgcgataatcgcgcagaccgtatttttgttcgtaggtgtaatcggcatggcctggacggaaaacgtccttaatcgcactgtaatcctgagagcgctggtcagtgttttcgatcaacaagccaatgctggtgccggtagtaacgccttcaaaaacaccggagagaattttgacctgatccggctcgcggcgctgggtggtatagcgcgatgtcccagggcgacgacggtcgaggtcatgttgcaggtccgcttccgtcagcggaatgcctggcggaacaccatcgacgatgcagccgagcgccagcccgtgcgattcgccgaaggtggttacgcgaaagagttgtccaattgtgtttccagccatcacggctccgttattgttgtgtttgcgtgtttacttaatctttataaatcgcgaaatgttctcgtgcggcaataagctgctctttggtgagcataaacacaccatcgccgccgttatcaaactccagccaggtgaacggaacatccggatattgttccataagatgtaccatgctgttgccgacttcacaaatcaacacgccatcatcagcaaggtaatctgccgcgttaccgagaatgcgacgcgtcagtttcaggccgtcagtgccagatgccaggcccagttccggctcgtggcggtattcgtttggcaggtcggacatatcttccgcatcgacatacggcgggttagtgacaatcaggtcgtactgcactttcggcaagtcgcggaacagatcggaacgaatcggaatgacgttgtggatcagaccgtgttcttcgatgttctgttcagcaaccgccagcgcgtctggagagatatccaccgcgtcgacttctgcatccgggaaggcataagcacaggcaatggcgatgcagccgctaccagtacacatatctaaaatatgctgcggttgcttgctgataagtccggcaaatttattgttgatcagttcaccaatcggcgagcgcggcaccagcacgcgttcatcgacgtaaaattcatggccgcagaaccacgctttgttggtcaggtaagccaccggaatgcgttcattgacgcggcggatcacgcgttcaacaatacggtgtttttcgctggaggtcagacgcgcggtgcgcatatcttccggaatatccagcggcaggtagagcgaaggcaacaccagctgtacggcttcatcccacgggttatcggtaccgtgaccgtaccagatatttgccgcgctgaagcggctcaccgaccagcgcaacatgtcctgaatggtttgcagctcatttactgcttcatcaacgaaaattttatccacgtattcctccagggcatgatcgcaataatttcggcggctagtttgccatgaagatgacgataaatcagcattcacgcgcggtgagtgaggaaaaatacgtttaaaacgatcgattgcgctacgagtcgggtaaactgtaggaaaattagaaatagagacagataaatgaaaaagaaaacaacacttagcgaggaggaccaggctctgtttcgccagttgatggcggggactcgcaagattaagcaggacacgattgtccaccgaccgcagcgtaaaaaaatcagcgaagtgccggtgaaacgcttgatccaggagcaggctgatgccagccattatttctccgatgagtttcagccgttattaaataccgaaggtccggtgaaatatgttcgcccggatgtcagccattttgaggcgaagaaactgcgccgtggcgattattcgccggagttgtttttggatttacacggtctgacgcagctgcaggccaagcaggaactgggggcgttgattgccgcctgccgccgtgaacatgtgttttgcgcctgcgtgatgcatgggcacgggaagcatattttgaagcaacaaacaccgctgtggctggcacaacatccgcatgtgatggcctttcatcaggcaccaaaagagtatggcggtgatgcggcgttgttggtgttgattgaagtcgaagagtggctgccgccggagttgccctgaggagttgagcgcgttgcgccaggtacgggtaatggcaggggcgaatgcccctgcctggtgtatctaagggctacaactcattcagtatgtactggaaccggcaagtagaatcgattggctgcatactgctggtatcaacacgcacgaccatatcgtgtaactgtttgtccgttatagggtgtcgatttggcgtgaccgagacttccgccttgtcacatcccgacgcggtaaaagttatcatctgtgcaacccagcggcagtaaccacctgtttcattcatctgcgtactgtcgcacaacttcccatctttcatcaaatacgttgaaagcgttttctcaaccacaccgcccgtcgactgcagggtgagcagttttgacttactgacataattctcattccatgaaacgtcataaggttgaacagaaacggatggacaaatcgtgtcgtgactatcaggcccctgatacgtcacgccccctggagaggcttcagagtcattcataataaccaaccatggacaagaaaagtaagattcaatctctgcagagacaataacctcaaatgtataatacccgcagttccacccagacggtaatccaggacaacttgctttgttgatattttgatggtagccaatcagcttaaccgaaggggcaggaggaggaccactccagctcacattttgcaatatttccccagtcatgagccattgactacttttatattcaccaacgtacactgcggatggcatcattatttttaaattaaaagtcgcaatattacgcgaatcaccgttgtaaccgtagtaaacgtcaacgctatgcccggcagccatagcttctgtagtagcaataagcatgaccagagcgaacaaccatcgtagtattttcattttaaatatactcaaatgtcgcagttaaagaggcggtaaattcaccgatcgtcacatcacggccgcttttcgcctgtagccaggctctgaaattgatatcgttattgccattggttagcgcaaaggtcgccccatttgtattgttgatggcaacctgcattccgtcggttttttccatgccaattcccactccctgagcggttgatgacgtatccagtgccagaaaaccgggttgttcgctgtcttctacccccgtgagcgtgacttttacgttgtatcccgccggccctttgcaatctttcagcttaaagactacgggtacacgagcggactggcctgcaacgttcaaatcctgacgactgaccgtgggaaagcgcacctctgccagatattggccatccaccaccagcgcacaggatttacttaataaattaccggagaaatgcagattattatctgccgcgaataacgtgctactcattgccaatatcagccccgctaacaggacgtaaccaccggactgaatcattgatttattcattgataatccacccgtaatgttgcgtaagccgaaaaattcgtatcgcttaacacagcatcactcgcttttaccggtacggcctccagcttcggcttttgcgtaaaatcagtggcgttgatagcaagcggagtattgagtttaaaacgctgaccatcgtgctgaagctcgataccaaaaccgggtacatcagtttcaattgctgcatcattaaaactggtttgtgtaccagtccaggtgagggtcatctcccaatctggatgacgggtcgtcgagtcacaagtgagttcatatggcacctctttacgaccatagttgccgttgatgtcgtcgataatgagatcgcgaaattcgacttcaatggttttaccaccgctgatgctacaggttggcggtgacaataatgtcccgtgaaaggtgatgtcttcatcagcagcatgagctatggcgctactgacacaaagcagggttaagaaagtctttctcattgatagtccaccaccatggtcaaactggcgttaaactcgcccgcagcaagttgcgccccgcttgccttcacaggtacagccttcaactgtggctggttattgatattaaatggcgtccagctattttcaccgacggcaaacaatgagttatcggcgctattttctatccgaatgcccagcccggtgatattggtactgagtaccgtttcgccgttaatcgttgaggtattgcccttaagttgcatccgcaagtcgttagcaagactgtttgtgcagttcaacgtgtatttcgcatcttgccgataattggtgccatcaacgttatcagcaatcatattgccgaactctacctggctgcccttgattgaacagggtggcggagcatcgaccaacacgcgcagaattaaatccacgggtttactaccagccatagcagataaactacagacactgcataccagcagccctgcgcccactacaaacttttgactcataactccccccgtcatcagcctttgcggctctgctcttcatccacctggcagctgttgccattgcactggaagaacagcggcatccgtgcgccaaagtcgttgacgtaagtcagcaccggtacgctatccattttcacattcagcggtaccgtggttttcggctcaatgaccagaggcgagaaccctgcagctggattaccgtttttctgcgcactggcgttgctgataatcacgtagtacggcgttgggttattgacggtaaatgcctgaccgctgcgggtgagcgtcaccttgtgctgccacggacttttcatactgaccttttccagcgcctttggtcgccagaacaacttgatacgcgtttgcagcgcgatttgcagggtattgggtttgtttgattttggcgggatctcgcgcacgttaaagtagaacatgctttcacgatcggctggcaatttgttgatatccggcattccctgcacttttacctgcccgttcatcattgaatcgatgcgttgcactggcggcagcacagttaacggcgaggtgatcttgttacccttttcatcttcaatccagctttgagccagataagggagtttcggatcgttattacgcagcgtcacgctgattgatttgtcgctttcattaaatatcaaacgggtacgatctggcgttacagacgccagggcagacaaactggtagcgctaagcagtaacgccagcgtcatagcacccaatttggcagagcaaagtaaatcagacatggatcattccttaatcacgttattggttagctgaaacagaaacagggggatcggtgggtgtcacctgttgcgtctgctcctgaatgacaggctttatgtcatcaggaacaaccggcgcgacgttgcctttatgctggcatggcagtaacaagccgttaaacagatcggcaggcagcgggtccggcaggttgatatcgcaatgcgcaacaccactccagaacacactcatatgttcgccaggtttcaccccagccagatagacactaccgtcatcatcgacaaggcccactgtctgctcgttatcattttttacttctgcgccaaacggtggatggctgccatcttgtaaacgcagcaccgccatcgctttttgaccactgatgacggcaaatttgcggtagccaatggctccttcagttagcgtggcttgcaccaccgactgggttgcttcggcgttttccggcaatttgttgaggtcgatatacgcctgattgcgataataattgttaacgtcagaaacgacggctttaccaaacatattggtataaacagcagccccgttaccttccaccggaacatcggcaacgccatcggcatcaatcagcaggcgtgtcccgcccatattctgggtacggtgaagtgcgccgccgtgggtagtaagcgttgcgccgccctgtaacgacaagcccgcagaggtgtattgcccttcatggtagttcgcactgaggtcaacctgcgccagcgaaccatcatggctgtagtagccatcaacgctggtgtgtttgtcactggtgccgatgttcaactgatagtgagtcgcgtcatcgacacggctaaaataaccgacctggctgctgtccgtcccactgccatagttgccgttatagctaacggtactgttgtcgccccacggcatactgagcgaaatgtacatgcccttatccgcccggttgtcatactcgtagcggtagccagtcagggaaacgctcatattacgaatgctgcccatattgaaatagtgggagagcatgatgttgtagtttgtctgctcctcacgatcccagtaggtatggcgggtatagttgagataaaccgaaacacccgcatcgcggaagttctggttataagtggcggtgtacatctctttgtcgttgcccgtacggaccatttcgctgtcactggcatccagatactcgctcatggtcataaagttctcttccgagaagcgatatccagcgaaagtgacgcggctgttgagctggtcaaagtctttggaataactcacacggaaggagttaccgtccagcgaacctttgccataagcggtgtctttatccagtttggtatgcgaatgagtaacatcaaacgcgaccgcgccgaaggtagacaaatcgcgaccgacgcccagcgccgcagactgatagttttcatcacccagcgcaccgccatataacgaccagccgttagcgatgccccaggaggcttcagcaccagagaaaaatcccccctcgacatggtggccccactcttgcggacgtcccatcatgatcttatagcgaacctggcctgggcgagtgaggtatggcatcgaggcggtgctgatgtcatattcctgcacctggccgttctgttcttcaatgcgaatatgcaacgtaccggagacggaatcaccaagatcctgaatacgaaacggtccagccggaacctgcgtttcgtaaatcacacgccccatctggctgacggtcacttttgctgtggtgtgtgccacgccggaaatgtctggcgcgtagccgcgcagattgggaggcaacatttgatcgtcagtgctgacactgccaccaacataattaaaaccgtcgaaaatatcggaattgaggtaatcttcgcccagcgccagtttggcttttaatgacggtaacgcccgccaggcataatagcgactccactcccattttttttgtgtgtcatcgccgccaaattcatcgtcatcatcattactgcgcgtatgttgatagttggtctgccagtcagcgcgcatacgccatggccccaggttaaccccgaccgtcccgttgccgctgatctcgttactgtcatcgccgccattttcttcgtgtcgtgtttgcgcagtgatgctgtagtccgcaatgatcccggagatgccatcatcccaacgagaaggtggatcccagtcgggccaggtatattcgaggtaagcctgcggtagtgaaatgactaatgcggactggcttaaatcagccttaatttccacgccttccagttgaccgggcttcaggcatttaccatcgtggctccattgcagatttttcgccacgtcttcttttaaaccaaactgcgccaccagttccggtgtcagacaagcatagcttttgctaacgtcatcttcaccagcataccagtaaatatcgtactcttccgccaatggctgtttatttagttgaacctgtaaattgtattttccgggctcaacatacccctggctggaaaaacgcttcagatcaatttttgtgtcgccttttaattccagaaaacgggaatcaaactgaatgtcgtcttcagcccagacactgctataactccctgacattgccagcgcaatgcaccacggaagaatccgtaatcgaaaaagagaatggtcaggcatacacgtttttatccgtttttattcttgttcggtcaaaatccatttaaataccccatagcagtgtcgctatgggggtatgccttacaggtaagtaatctggaaggtggtatttgcttcgaaattacccagatctggcgcatcagctgcgccgaccagccaggctttaaagttcagagtctgcttcgctttgcctttattagtggcagtatctttcacgattttctggtcaatacccatgccgcttttgtaagaggtacccagagagtcaccgatcgccaggctaacattgttaaatgccgcaccggtatcggtattgaaaatggtgtaataattgccgctatttgcagaagaaacggtaccagtaaaggtagtggtcattgtttcctgagtatcaaatacgcaatcttgcaggcgaatctggaaatttttcggcgtggtggtgccgttatttttcagtttttcggcaccgatatcacccatatcaacttccagtttgtgatcgtccggaacgatagaacacactgagtcttcaatggtgccgtaaaaacgtgcagtaccgttgttacccgcagcgattgttgccgtagaggtgaacgcgcccatcaccattgccgcagcaatagctgttttaacaaacttactcattatttgtccttaaactataaataattaaaatataaacattgcaatacattgattcagtcaatagccaatgtttatacccagccattgaatacggcatgcgatccaaaaaaacaggtcgtaaaaaatgtattcgttggtgtggggtcgaatagtgatgttttcactcccctgattcaatttaattttactaatgagtaaatgtagatttaattaatatattgataggggaaagattatcttaaggatcttctaaaaaaacacgaaatatatatttagaaaaaacaggaagcatatcaacaatgaatgccaatagcttaaaaaacaaataatgaacatataatgcgattggcattaacccgcttttgtcgatataatatataaacactatagccagaatttaatcaagtttcaattacgtcctgcctgattattcaactctattttctccattatctgtattaataaatgataatgagtgtcaaacagacattattcatttcaacatgtaactttgggcaaaatcaagatacgcgcagaagaatactttccgaatgaaagttaaaggtgttttatttatagatggggagagtcttcgatagtagtgaggttgacagatatccgctgcctgatgagcaattatgcccaatgaatctacctcattgggcataatttggaactcatcagatagcttttgccatcttcagattacacgggctcatctgccagttgaatgtgccgtttccgctttcatcaagcgttacgctggcaatggccgaggtggtaaacataggcggcgtttcgcccggacataactcggcaaccagatacccgactaacggtaagtgagagatcaccagtaccgaagcaacaccttcattggtcaacgcctgcaaataggcactgaccagaccaacatcgccgcagggcgttaactccggcagaacttctgcactggaaggcaggttcagacaatcccctacttcttccagtgtttgctcggctcgcaggaacgggctcaccagaacgcgttcgatttccactttttgacctttcagccagttcgccatcaggcgagattcgtcacaaccattagtggtcagaggacgaacggaatcactggcggcatcgagggctgcgtcgccgtgacgcatgataaaaacttgcatattgcaccgcttttgttaaccagattcgcccgttttctttcatctgaaaccagagaaagaaaacggtggccggcattgtgccttatccattcaccgaatgaaacgctgttttttacctcaatggcgtaagtatagtcaatatgcgtttacattttgaccaacactccgccattcagcgcggattcatatagctttgaccttcttattgcaggtcagttgcagttgttttccaaaaactttccccacgcgcgcccatctcgaccaaacgctcgcaaggggtaaaacgggaaccatactgcgtggcaagtcgttgcattattgcaaccacttcgcccgcgccgagagaatcgatatagcggaacggtccaccgagaaatggcggaaaaccaatgccaaataccgcgccaatatccccgtcacgcacgctacggataacctgctcatcaacacaacgtactgcttcattcagcatcaacatcacacaccgttcagcaacctgcggtgcggagattcgcccctgcccttgtgtgccaatcagcgggtaaatggcaggatcgacctgttttttgcttttacgccctttctgaccataaagatagaaaccccggccattttttctgcctttgcgatcgtcgttcaaaattgaagaaacaacatttgcaggcgcgctaaaacgttctccataagcggcttccagtacaggaataattttagtcccggtgtcgattcctacctcatccaaaagttggattgggcctaccggaaaaccaaatttcactagcgcggcatcaatgtgctctacccgttcaccttgggtcaacatgcggatagcttcattaatgtaaggcgctaagatgcgattgacgtaaaaaccggctttgtcacgcacgacaattggcgttttaccctgttttttcgccagttttactgtggtagcgatggtttgcgccgatgtccccgcatgaggaataatctccaccagcggcattttttccaccggactgaagaaatgcaggccgataacttgctcaggtcgcgtggcgtgagcggcgatatcaccaatcggtaaagatgacgtattcgaagcaaagatggtatgagcggcgcaattttgctcaacttccgccaccatctgttgtttcaattcgagattttcaaacaccgcttcaataatcagatcgcgatgggcaaagccgcgatagtccgtcgttccggagattaatgccagctgtttgtcacgttcgctggctttgagatgacgacggcgaactttgccctccagctgatcccaactgtacttcagcgcatgatttatgccctgcgggttgatatctttaattctgaccggaatccccgctttacaagcagtgacataagcaataccgccgcccatcaagccaccacctaaaatccccacgctgtttaatggcgcaggcggcgcatcactgccgggatctttcttcacgtccgtactggcaaaaaagatactacgcagcgcctgcgattgtggcgtcatcgccagttcgccaaacgcccgagcttcggcgtcataaccgcttctggtgccctgcgctaatcccgtttcaacaacctccaggatgcgttctgtcgccggataattgccttgagttttgtgttctgttttcttgccgaccattttgaacagcagcgcacgacctaacggccccgccagaatacgctcgcgtacaggtagagggcgggaagatgggcgctccttctttgccagctcaacagcggcttccagcagaatggagtgcggaacaacgtcatccaccagccccagctttaatgcctgtttcgcccgaagttgttttccggtgaggatcatctctaatgctgtgctgacgcctatcagacgcggtaaacgctgggtgccgcctgaaccgggtaacaatccaagttgtacttcaggcaaaccgagcaccgttttaggatcgtcagtacaaacgcgaccgtggcacgccagcgccaactccagcccaccacccaggcaagcgccatgaatagccgcgataacctgaatgggcaaagcatgaatctccgccatcaactgttggccctgccgcgccagagcttccgcttcttgcgccgttttgcagttgccgatcatgttgatgtctgcgccagcaatgaagttgtccggtttagcggagacaaacaccacgcctcgcaactctttgttttcacggagttgcttaataatggcgcgcacctgcgaggcaaactccgccttcagggtattcattttctcacccggtacgtcgatggtgataacggcaatgttgtccagacgaacattaagggtaaacgctgatgtcatttccattattccgcctccagaaccattgccgcgccaagcccaccggcagcacaggcggtaactaaaccaaatccaccgccgcgacggcgaagttcatgcaatgtctgggtaatcatccgcgcgccggtcgccgcgaagggatgcccgtaagcaatcgaaccgccaagcacgttaaatttgctatcgtccacttcgccagtggcatgtgcacgccccagtgcttcacgagcaaaacgttcactacccagcaactgaatattcgccagcgtctgagctgcaaaggcttcgtgcatatcgatcaatgtcagatcgctcatcgtcaaaccggcacgctccagcgccagcggtgttgaccaggctggaccgagcaacatgtcctgccagacatcaatcgcagtaaatgcgtagctgcgcagataccccagcggcaccagccctaattctttcgcccgggattcagtcatcaggatcaccgctgccgcgccatcggtcagcggcgtactgtttgccgccgttaccgttccgtgtttgcgatcaaacgccgggcgcagctttgcgtaatcggcaagcgaggaattaccgcgaatattgttgtcttcgacaagcggttgtttataaggagggataaaggcagtcatcacctcttctttgagttttccgtctgaccatgcctgagcggcacgctgatgcgaacggtgcgctaatgcatcttgctgttctcgggtgatgccgtaggttttcgccatttgctctgcggtgtcgcccatccgcaagccggtagaatattctgctaccgcaggtggtacgggcattaagtcgcgcaaacgcaggcgagagaagagtttcagtcgctggctcatggtacgagctttgttgacatcaaccagcacgcgcgccagttttttactgacgccaattggcaataccgaagaggaatctgccccaccggcaatccccgctcgaatagttcccgccatcaggctttctgcgacgtttgcaactgcctggaaactggtagcgcaagcgcggctgacgctgtaagcatcggtatgtacattcattcccgtaccgagaacaatttcacgcgcaatgttgggggcttcaggcatttgtacgacctgaccaaagaccagttgttcaatcacttcggcggggatctcgctgcgtgccagcagttcgcctaccaccatcttccctaaatcaaccgcgggaatgccatgaaaagccgtcgcctgacgggcaaaaggcgtacgtaaaccgctaacaatggcgatacgatcgccctggcgggtaaccagcggtaaaacctgacccataacactcccctgtaaaaaaataaataaagtggtctgacctgatcatagtcttaaccatttttttacatttagccaagtggagaaaagggaaagtgggagctatgacacagagagaaaagaagaagagaaaagaaaacgcccctgccagcaactgacaggggcgtacgtacccgagaggaattaacgcagacccagctggaaaatcagcatttcagcttcgcaggcaaaagtgaaatcgatatccaggcgcacaccgtcagactcttcagtgaaagtcggggtgattttgcaaggttcagattccacgctacgggctttttcagtcagcgccgccagcgtttgctctgcttctgcgcggtttgcaaacacgcggctgtaagacgcggtgcagtcggagttgtccataatggtgccaacatccatacagcagcaaaccggggtttcatcagcactacatttactcatcgttgatttcctctgtatgtgcacccaaggtgccagataaacgttgtggatattttacgcttccggaaagtgctgctccagttgttaattctgcaaaatcggataagtgaccgaaatcacacttaaaaatgatctaaaacaaaattcacccgaatccatgagtgcgccacctccaaattttgccagctggatcgcgtttcttagatcatatttgaaaaaagatagaaacatacttgcaacattccagctggtccgacctatactctcgccactggtctgatttctaagatgtacctcagaccctacacttcgcgctcctgttacagcacgtaacatagtttgtataaaaataaatcattgaggttatggtcatgagccagaaaaccctgtttacaaagtctgctctcgcagtcgcagtggcacttatctccacccaggcctggtcggcaggctttcagttaaacgaattttcttcctctggcctgggccgggcttattcaggggaaggcgcaattgccgatgatgcaggtaacgtcagccgtaaccccgcattgattactatgtttgaccgcccgacattttctgcgggtgcggtttatattgacccggatgtaaatatcagcggaacgtctccatctggtcgtagcctgaaagccgataacatcgcgcctacggcatgggttccgaacatgcactttgttgcaccgattaacgaccaatttggttggggcgcttctattacctctaactatggtctggctacagagtttaacgatacttatgcaggcggctctgtcgggggtacaaccgaccttgaaaccatgaacctgaacttaagcggtgcgtatcgcttaaataatgcatggagctttggtcttggtttcaacgccgtctacgctcgcgcgaaaattgaacgtttcgcaggcgatctggggcagttggttgctggccaaattatgcaatctcctgctggccaaactcagcaagggcaagcattggcagctaccgccaacggtattgacagtaataccaaaatcgctcatctgaacggtaaccagtggggctttggctggaacgccggaatcctgtatgaactggataaaaataaccgctatgcactgacctaccgttctgaagtgaaaattgacttcaaaggtaactacagcagcgatcttaatcgtgcgtttaataactacggtttgccaattcctaccgcgacaggtggcgcaacgcaatcgggttatctgacgctgaacctgcctgaaatgtgggaagtgtcaggttataaccgtgttgatccacagtgggcgattcactatagcctggcttacaccagctggagtcagttccagcagctgaaagcgacctcaaccagtggcgacacgctgttccagaaacatgaaggctttaaagatgcttaccgcatcgcgttgggtaccacttattactacgatgataactggaccttccgtaccggtatcgcctttgatgacagcccagttcctgcacagaatcgttctatctccattccggaccaggaccgtttctggctgagtgcaggtacgacttacgcatttaataaagatgcttcagtcgacgttggtgtttcttatatgcacggtcagagcgtgaaaattaacgaaggcccataccagttcgagtctgaaggtaaagcctggctgttcggtactaactttaactacgcgttctgataacgcgttcgcctggataaagtcacctgcatagcaggtgactttaactcccccacttcaccgaaagtagtgtcctcaggtgatgctgccaacttactgatttagtgtatgatggtgtttttgaggtgctccagtggcttctgtttctatcagctgtccctcctgttcagctactgacggggtggtgcgtaacggcaaaagcaccgccggacatcagcgctatctctgctctcactgccgtaaaacatggcaactacagttcacttacgccgcctctcagcccggtacgcaccagaaaatcattgatatggccatgaatggcgtcggatgtcgcgccagtgcacgcattattggcgttggcctcaacacgattttccgccacttaaaaaactcaggccgcagtcggtaacctcgcgcatacaaccgggcagtgatgtgattgtctgcgctgaaatggacgaacagtggggctacgtcggtgctaaatcacgtcagcgctggctgttttacgcgtatgacaggatgcggaggacggttgtggcgcacgtcttcggtgaacgcactctggccacactggagcgtcttctgagcctgctgtcggcctttgaggtcgtggtatggatgacggatggctggccgctgtatgaatcacgcctgaagggaaagctgcacgttatcagcaagcgttatactcagcgcattgagcggcataacctgaatctgagacaacatctggcaaggctgggacggaagtcactgtcgttctcaaaatcggtggagctgcatgacaaggtcatcgggcattatctgaacataaaacactatcagtaagttggagtcattaccgtgtcctcattgcttacctcctgagttttgcaaacagcctgttggcagcttgccctttcaaatcaataagcggtatccacagacaaacctgaagggaaaggcatattttcaggcgttctgctcgtccttctcaaagagtttacttttctgcatttccaggatactccccccccctggctattgtgcgctcatacactcaaattaaagataggttctaaataaatgagcgttttttgatagtctatttcattaggtaatatatatttgtaacaaatcaatcaaaatggaataaaatcatgctaccatctatttcaatcaacaataccagcgcagcttacccagaatccatcaatgaaaataacaatgatgaagttaatggattagtacaagagttcaaaaacctttttaatggtaaggaaggaataagcacctgtattaaacatctacttgagcttataaaaaacgccatacgagtaaacgacgatccttatagatttaatattaataattcctcagttacttatattgatattgactccaatgatacagaccatattactattggtatcgacaaccaagaaccaatagaattacctgcgaactataaagacaaagaactcgtccgtactatcattaatgacaacatagttgagaagactcatgatatcaataacaaggaaatgatcttcagcgcattaaaagaaatatatgatggagatcctggttttatcttcgataagatatcacacaaactcagacatacggtaacggaatttgatgagagcgggaaaagcgaaccaacggacttatttacctggtacggtaaagataaaaaaggcgactctctcgctattgtaattaaaaataaaaacggaaatgattacttatctctcggttactacgatcaggacgactaccacattcaaagaggaattcgtattaatggtgatagtctcacccaatattgtagtgaaaacgccaggagtgcttcagcgtggtttgaaagcagtaaagctatcatggcagaatcatttgcaactggttccgatcatcaggttgtaaacgagctcaacggggaaagactgagagaaccaaacgacgtttttaaacgttatggtcgagcaataagatatgattttcaagtggacgatgcaaaatataaatgcgaccatctaaaagaaatagtttctactttagtcggtaacaaaattaacgttggccattctcagaaaatatataagcattttaaggatctcgaaggtaaaattgaagaaaggcttcaaaatcgccaggctgaatatcaaaatgaaattaatcaaccatctgcgccaggtgttaattttgatgatatttaaaattatttttccagttttttgatttttcaacagctgaatatcggaaatagtcagtgacgaacatcagtatttttacataattacgtctaggtcattgtcggtttatctccttttacttgtggtaattgagggataacaacaaaaaaggtgagttttgcgactcaccttttttatttgtttcttattcagaatcaatatcttttaaatcatcctgaatcgcttgtgcgttcggattttcctgcggtttgagttcgccgccattagcgatgaaatcatgacgctggaagtacgcttcgcgcaccataatataaggatcggacgactgacgcagcagaccatcggaatccagcagctgagcgcgggtttcgatcccttcaagcgtccatttacccacagacatcggccaggtcagccaggaaagaaccgggtaaagaccatccgccatatcaccaccgtcatcacgcagcgtgaagctaccgtagaacggtaactgaacgtaaggcccataacccacgccataatgaccaagcgtactaccgaagcggtgaggctcagtccgttgcagtttcgggttcgccatccctgcaacatcaataaaaccgcccatccccaaaatggtgttcaggaaaaagcgggtaaagtggaccatcccctgataagggtcgccctgcaagaagtagttaaccatcaccgcaggttcttcaaggttgccagtaaagttgctcaaaccgttacgcgccggttgcggaacataatcacgccaggcgacagcgaccggtcgaacaatatacgggtctaatacattgaagttgaagttgtacatggtgcggttgaacccttctaacgggtcagaacgcccttgctgatctgtaccggaactcgcacaccccaccagaagcgtagttcccagagcaagcgccgacaggcgaagcttcataaatgtctccctgtttttttatggcttatgcagtttgccatccatgacggaacgataccgtatccgcctgtttaggtgtgggcgattgtaacagcacgtcaactgatgtccagacgccctgatttgctgatttgatcatagcctggtaatcgccgccctgtaggctacttgattctatagaaacagaaaaaggcaaacgcagccttttctacattttcagagtaactcccgtcagttgcgagcaaaaaagccgctacgctttagctatacgtgctaattcaagagaagagaccatggacaacgacaaaattgatcaacacagcgacgaaattgaagttgagagcgaagaaaaagagcgcggcaaaaaaatagaaatagatgaagaccgactcccctcccgggcgatggcaattcatgagcatatccgccaggatggtgaaaaagagctggaacgcgacgcaatggcgctactgtggtcagccattgcggcgggtctgtcgatgggcgcttcgttactggcaaaagggatatttcaagtcgaactggaaggtgtgccgggcagcttcttgctggagaatctcggttatacctttggttttattatcgtcattatggcccgccagcaattatttaccgaaaataccgtgactgcggtactacccgtcatgcaaaaaccgacaatgagcaacgtcggcttacttatacggttatggggcgtcgtgctgctgggtaatattctcgggacaggtattgcggcgtgggcatttgaatatatgcctatcttcaatgaagaaactcgcgatgcatttgtcaaaatcggcatggatgtgatgaagaacacccccagcgagatgtttgccaacgcgatcatttccggctggctgatcgccactatggtttggatgtttcctgcagcgggtgcggcaaagattgtggtgattatattgatgacctggcttattgccctgggtgacaccacccatatcgtggtcggttctgttgaaatcctctatctggtgtttaacggtacgctgcactggagcgatttcatctggcccttcgcactacctactttagcggggaacatctgcggcggcacctttatcttcgcgttaatgagtcatgcacagattcgtaacgacatgagcaataagcgtaaagcagaagcacgccaaaaagcagaacgtgcggaaaacattaagaaaaattataaaaacccggcataaatggcgagggtttaagcaatcgagcggcagcgtacttaccccgcactccattagcgggtatactcatgccgcattgtcctcttagttaaatggatataacgagcccctcctaagggctaattgcaggttcgattcctgcaggggacaccatttatcagttcgctcccatccgtaccagtccgcaaaatcccctgaatatcaagccttccgtagattcacagttcgtaatggttcgcgtcagatcgttgacagccgcactccatgacgggtaaaaagtggataaaataattttacccaccggatttttacccatgctcaccgttaagcagattgaagcagcaaagccgaaagaaaaaccataccgcctactcgatggtaatggcctgtacctttatgtccctgtgtcagggaaaaaggtatggcagcttcgctacaagattgacggtaaggagaaaatcctgaccgtaggaaaatatccgcttatgactttgcaggaggcaagggataaagcatggactgcgaggaaagacatctcggttggcatcgatccggtaaaagcgaaaaaggcttcgtctaacaacaattcctttagtgcaatttacaaggaatggtacgaacacaagaagcaagtctggtcagtagggtatgcgactgaacttgcaaaaatgtttgatgacgacattttacccatcatcggcggtcttgagattcaggatattgagccgatgcaactgctggaagtaatccgcagatttgaagatcgcggtgcaatggagcgagccaacaaagcacgcagaagatgcggcgaggttttccgttacgctattgtcaccggcagggctaaatataacccggcacctgaccttgctgacgccatgaagggataccgcaagaagaacttcccgtttcttcctgcagaccagatcccggcattcaacaaagcactggcaacattttcaggaagcatcgtatcgctcattgcgaccaaagttttacgctacacagccctaagaacgaaagagcttcgttccatgctatggaagaacgtcgattttgaaaacaggattatcaccatcgacgccagtgtgatgaagggacgcaaaattcatgtggttcctatgtcagaccaggtggttgaacttctcactacgctaagctcaatcaccaaaccagtatcagagtttgtttttgccgggcgcaacgataagaagaagccaatttgcgagaacgctgtactgcttgtgatcaaacaaatcggctatgaaggtctggaaagcggtcacggattcaggcatgaattcagcacgattacgaacgagcacgaatggcctgctgatgctattgaagtgcaactggcacatgccaacggcggatctgtgcgtgggatttacaaccatgctcagtatctcgataagcgcagagaaatgatgcagtggtgggcggactggcgatgaaaaggtggagtgatccaccttttctgttaattattcagccttagcaaaagtggtcatagttgttccactgaaagtgaatgacctgtctgtaagagtaacatcctgaatagcaaagtaatcgccaacaccagcgccatttacataaaactcgaatatctcagatgtattttccggaataatattattagcaatataacacgtagataaagaaccatttgttgatggtaaagttccaaatagcgttgcatccgatgcagcatatatcgaactgcttaaataaatatttatatcaacattactctcataagtaacaattaagtacacccggtcgttaaccttccaccctctgtcttttatcttagtattaagtgatagcttgttagaactaggggtcgttacggtattaatggttatttttgctcctattgagttgtatctgcttctggttactgtattaccagtattgttcattgtataaaggattgctctgctttctgcaaacgtcctcatattaatcttgcctaaacaatctccttccataacttgtgggccagacacagttgcaccaatataacaattagtaaatacagcatgagccctgttgtcagtgcttgatgcaagtaatgaaagtttaaagttgccctgatctgcaatccagcaactatcaaccttaactacagcatcattgtcaagaacaacaaaccttcctccctcattgtaatatcctacaaaagcatttacaccgcttatttttactactccatctggaaccgtaaagatatcgccttgtatcgcttcgccatagtacccgccaacaatattggtcactcgggtatttaagtacatgccatgcccaatgccgaactcaaggtcacatccaattaagcttaaaccttcaataggggaagtaccagaagcataaaaggcatattcaccgaccttatttgatgcaaatccacagttattgaacgttacgcggttgttagccccagcaaggtgaactccgcgatttggcgcaggaacaaaagaacagcaatcataggtattaagccagtcgtttatagtatagaagttcgccaccacgccattgatgaaacgacaattatgggttcttcctaggtgaacatattgaattcggcaagcatagttggcgatgttgttcccatcaactgtaacgtgagagatagatgtgctacgtcttatagagtcagtttcgtagtacatgttgacaactgtctctccagtgaacccactccccgcaataatgaatgacttctcaacgccatccccgaataggtcaacagtgcctattgttaaatcaactggtgacttaacatagtaagttcctgcagggacaaacagcctctttcctgccgataaagcaactgctgcagcagcattaaagctagctgagttatctgccgctggatcaccagtaatggggaaaaattgagcaacagaaatataatctgctaccgtcacttcgtaccatggcaaagcaggagatgacggaagagtgccactaccaccggtgtagattttattattataccaccaccagttatcaacattagataacaccccctcctgccacaccccccctaacgagaaatcaagaccgtaagaagtagctatctgacttaatgataatgttgctcctctgtcagaagctaattcttgccttaattggtcagggtcatacttcagcacattaggaaaatagaactgctgtgcaccatacgcatcataaacagccatagaatggccttgcacagttacgaacttggcaatctgtccgttatataccggatatccagcagcgttaatgatgattggttgcgaaacaggaacgtgagagccgtcttcgttctccacataaacctgaatctggttttcaggatttacagggtcagtgtcaattttaccgatataaattttgccattggctacggctttaaaagaacgagccatagtgaagagttgcgaaggcatgcttaccacaacatttgcggtgatatctgacatttcattgctccagacgaatgatatgatgcaaccatgatgtggttgcataccgaaatggtactattgagtatttatccagtgggttacgatgccattccacccaactggtgaggcatcaaggatgtacagcaaatacgacgatgcgcagtttcacttgagacttccgcatgaactccacgcgaaaattaaacagcgtgcgaagatgaataacaggtcactgaactcagagataattgcagcgattgaagaatcattggctaaacaaagctctgcatcagtttacattgacgatgcagagcgtatggcagaacaacaatctgatatggttaagaaaattgtctttgatacgctcaaagagatatataaaaaagacagcaactaaccatccgtggctttccgttacttctggttatcatcactgttcatccagtacatgatgcctagccttgatatggttttcttatctgattctggaagtgagttgtaaaacgagcgccaagcagaagagcgtcttacagttgtatcaacgatgctttctggtgcttgttttactgccagccttgctgctttctggaattctggtgagctaattagcttttctgcagattcaattgattcagcgccgcccatcgccctgattttgctggcgacttttgccccaatttctgacccagcaacagcacctactgcactgaacggtcctgacacagttgaaccaaccgcagtgccaatgcgttgggcatggttagcaacaaattcatttgccgcagtgacgcgattaaaccgttttacgaactcgtttagtcttcctgtagttatctcgtaagattttgcgtctttgatagcctttgcgaccttatatacatcgttcagacctgacatagtctcttttggtaaatgtcgggcaagattgcgcatctgcccgtttgctaacatgttttgataccagtcagcaaaccctgcaggattaaaatcagcgccacgttttccgttcgaaagcatatcccgaagacctgttcccagtagctcggttcttagcttcctggacggcgtgttttgcatcaattcacgaaatcctttggcatcgcctttcgacattgcctgtagtgctgtagttgctttgcgagaaacatcaccgttcagcgttctgccagttagattaatcatttgctcttccatgctttttcgcatctgaacaagcctctgagcaacttcaaaatcacgtaatgcatttgtctctgacagcgccgccttttgatcatcggcgagcgaaccgtaaagcctcgataaagcagcgcgatcagcatctttatatggtccagaattcttatgaagtgcatcaccaacaagtcgtcgttgcttattgagatttgcataagttaatgcgccgttcttgcctggattaactgcccgaaagactctcttttcaatagggtcaaggtttttcatcccgccaagatcttctgccacctgtttgagcattgaccttgttgatggcgcatcaatttttgcacctgcaggcatcgccttttcaacattgcgataaagctggtcgcttcgtttcatcagcgcagacattcttccattgaccgtatcaataaacttgtcgctcataccaagagcatcttttgcaccggaaacgcgatcaattatctcccccgcgccctgtgctagctgcctgattgcttcattttcctgcacctgtagagcagaacccgcacgggacttgattgcttgctcaactgccttgtattgctcgttcccggaaaagtgtgaagggagtaatgaatcaacattaagcctttcagcagactccagaacttcagcctgaggattgatatctagttcatcaagcgatgaagcgagatttggccttttttgtgctgctactgtgcgaacgacttcctctgggttcctcgtcgcaggcgtcattggtacaccttgtgctactcttgcctctgcggcatgaaccgcaggatttgttgctgcagcggcatcaccggagaatggtgatgtttctgttggcgccgtggtcgctctctgtgcagatgttttattgccactaattatatttgatgcaccacgaacaccacgggtaacgccatttatcaggccatgcgtagcaatgttaagtccggcattaatagcggcattttcggcaaaatcaccccgttgattcgccgcgtcagcgagagaaccaatgaccatgtttccagctacacctgctccaggaacaagataaccgtgaaccactctccagcttgcgcgtaggggtctgtcggtctgtctactggacgataaacatcatccaatacttttggccccccaagcccctgactgattgcattaatcagacttgcgccaccctgcaatacgtcaaatggtatgtttaccagaccacgaccagcctgttctgcaatttgccctgcactttgaccaccagtgagccaatcgccagcttgttgcatcaatgatggttcttcccgtgttggtgcattattggcctgattaactgtttgttgctgaacagcctgaccagcaaaatactcatcaatggcggtgccaatatcttcggtgctcgtaccatcagggaaggtaaatgtcttaccgtttgcagttactttcatcattccaccgtaaattgaatgcctgattttgaggtatatgatccaacctgattccttggttctcctgaaggtgtcgaatcttgtgctggcgctgcgtcagtattcattgacatataccgcttaacggcactccccaatgattcaccttttttaacatccaaccccaatatctgaccgccattacgcgattgtcctggattgccattcgcgctcatccactcggctttaaactcattaaactgcgcgtttcgtcgctcaaggtttgccatcgcatcaagccatcttgcgaccgtctcagggttatccatgtcagttggcgcaccctgtcgaacgatctcaacgtctttatccgttgctgggccgggaggtaggaatttaagaacctgactgttaacaagggcattttggcgaatgcgcaaatcacgcaatgttgtatcgcttccggtaagttttgcgaacatgttctgtgcgttaccgaacaaacctgtcgttggtttttctgctctgaactgttgagcaagcgcactcatagaattggctgagtttgatgatgctgtagcattgtttacagccgtctcgatgcctttttccatgtttactgacagcttaggtgcttcgctaatcaactgctgagccttttcctgcgcttgctgcatcttaaacccgaactcttgctgatccagagccaagcgttgtgctgcgatattgtgccctgtcattgctgactgataggaaaggttttgccctctcgcctgaagtgcctcgccagcctgattgctgcggattgtctctgccagcctgcctcggtcaatctcacgaccagccatcttgtcctgaacattgaagtagtcaatcggaccgagagcagccatcccaaggtgatcaacaaactcaccaaatcctgaaggattctgctgatacatctgagcaacgctgttagggtcaacaccgacgcgagtcagttccttggcgttgttttgcagccatgattgcattgcttctggagacgatgacgcaaggcgtgcgccagccgctaaggtgccgatagaattgcgctggtcttcatcaatgaatcccatgcctttacgaacggattcaatctggtctggatattgagtagccaactgacgcaaagcaccgcgatcaccagacgcataagcattagcgtacgcctgctgaaattctttctgccgctgagcctgcttttcctgctgaaacacccctgcaatgcctgaaaggccttgcaaagcagtaagcccaacattgttagcgcctgaacgctcaatatcattgttctgcctgataagctgaagcgtattgccgatgtcatttacgctcggagcgtttgagttgacgccgccgataccagctaacaatccgccatttgatccttgccaagtagccatgattaccccttaaaacaacgagccaagcaatccgataccagcaccaatgccagcgccccaaggtgttgatgttcccaaaaggctggcaagacctgcaccggcaatcgcaccagacgttccgccactaattgctgtctgaagacttgatggtttgttggcattagcagcggcaagagctgcgctttgctgtgcaatgctgctcatgttgttggcgtacgtctgcccggcgtttgcctgaccttgcagagcaccaagcccaacgtttgccagattgttgtaattgctcatctggtttgataaccaagactgaccgagagtcggcgcgatcgtagccagttgattgcttgtggctgtcgaaccaagtcctcccgtaaccgcgaggcatcgactatacgccgagatctttagctgtcttggtttgaccaaagcgcattgcataatctttcagagttatgcgttgttccatacaacctccttagtacatgcaattattatcaccgctagaggtaaaatagtcaacacgcacggtgttagatatttatcccttgcggtgatagatttaacgtatgagcgcaaaaaagaaaccgttaacacaagagcagcttgaggacgcacgtcgtcttaaagctatttatgaaaaaaagaaaaatgaacttggcttatctcaggaatctgtcgcagacaagatggggatggggcagtcaggtgttggagctttatttaatggcgtcaatgcattaaatgcttataacgctgcattgcttgcaaaaattctcaacgttagcgttgaagaatttagcccttcaatcgccagagaaatctacgagatgtatgaagcggttagtatgcagccatcactcagaagtgagtatgagtaccctgttttttctcatgttcaggccgggatgttctcgcctgagcttagaacctttaccaaaggtgatgcggagagatgggtaagcacaaccaaaaaagccagtgattctgcattctggcttgaggttgaaggcaactcaatgacagctccggcaggatcgaaaccaagctttcctgatggaatgttaatcttggttgaccctgaacaacctgttgatcctggtgatttctgtatcgctagacttggtggtgatgaattcacattcaaaaaactgatcaaagatagtgggcaagtgtttttgcaaccacttaacccgcagtttccaatcatcccatgcaatgagaactgcaacattgtaggcaaggttatcgccagtcaatggcctgaagagacgtttggataacacgtaaatgattaaagaacgtatttcttatatcattccgattgcgatggatgaaggcaaccccgtaactccagttcttatctatgaaatggataaagactcccatgaagtggatctgtcatttggcgctttttttatcggccttaaggctacaaaaaaatattccataggcattgaggttttcaatgctcaagaaataccgataccaattgacacaaaactgtactccaaccataagttttttacggtagcagaagccaacgatggagaaaccatcgtatcaacttctatgagaattaacttcccaagggtgaaaattatcaagcctgggatattcgaagttagagcatcactggttaatcctgagaaaggcgaagtaattgatgtaaaaagttcgttttttgacgtgaagataacaggatcagttcgcgatgagtttagataacaaggttgctcagcttcgtccaaatcaaaacatatctcgcccaattggacactattccactgatgatgcatactcacggcatggtggaggaaacggcggaggtaacatgcttgaggctagagttgcaaagctagagtctgatgttgaatacatcaagcgcgatctcgctgaggtaaagtcagatataaaatctgttgattctcgtctgtcaggtattgagacaagcattagctcagcaaaaaccaccattaaggcatctgcggtcgttgtcagtttcgtgttcgcattttgcgcctacatttttggaagttatgtttccaaaatccttgatgccttaaacggactcgttcttaagtaacacacaacccggcctcagtgccgggttttctttgcctctcgatcccccttcccaacaacacataaccatttgtatttattggaaaactaatagatacaacttgctaaacagtgcaattctgatccctcacctacctaacaattcacccctgcaaaaaataaatccatataaaaaacatacagataaccatctgcggtgataaattatctctggcggtgttgacacaaataccactagcggtgatactaaacacatcagcaggaagctggaagccaaacggaacagattggcatgctctttaacttcgatggggcgctgacaaagcgcaaacagataccaaacgagatgggtttggcggtgatgtgaattgcagcagtaacgacagcaaccagaagatcagcatctggcgcatcaccaccaaagctatttcacatgaggaaaacatcatgacggtaatcgtgtacggaaaatcaacatttgcaggaaatgccaagactcgccgtcatgagcggcgcagaaagctggccatcgagcgtgattccatctgcaacatcatcgattcgatcttcggcgcagacagtgaggagcctgttcaggaagccccgagaaaacgtttaagcctttctgaaaaagcaatatcactcggaatccttcgctgcaagaaggcagatgaatgcagtggaagtatttgcctgccaaacgtagccatttacgcggcaggctaccggaaatcaaaacaactgacggcgaggtaagtgatgaatcagacatacattccatcatgcttgagaaatctgccaaagcagaaagcaaagccccgcaagcaagccataaaggacgctaaggcagaggttattgatcaagcaatacaattgctcagggaggagttaagaagtggcaagctcgaaggaatgatgatgccctatcagcgcggatatctatcggcgattagtaagttggaagtactgaagagtgaattatgaactatctggaatttccggatggttcattgttttggcagcaaaccacttatttgaggtgatatatggaagaagaatttgaagagttcgaagagcatcctcaggatgtgatggaacaataccaggactatccttatgactacgactattgataaaaatcaatggtgtggacaattcaagcgatgcaatggatgcaagctgcaatcggaatgcatggttaaacctgaagaaatgtttcctgtaatggaggatgggaaatatgtcgataaatgggcaatacgaacgacggcaatgattgccagagaacttggtaaacagaataacaaggctgcctgatggtggcctttgttttttggccgtaaataatttcatgcttattacaatcaaggggatatatggaagaacaagcaaacaagattctcgtagaactactgcaaaaagccagtaatggaatagacgcggctgtttcatttagccaggcacagattcctgatgtcatccatcagcttttgatgtggcacgccgtatcatcagctggaattcaggctacatggtcagacgaagaattcattcgtcagatgaacaaaatgctcaatcagcacaaagaacaggagaaagatgatgattctgactctgaatgataagcgtgaaatatcgcaaataatcgcaagttttactgatgaagattacgagcgaatcaacagtgaagttgatcgtctctgcaaacgttgcgacccaataagcgaaatgcttcgctcatataaaccagatgaacacactaaggacgctatcgactggctggaagatgatgactgtaactatcaggaaaaagccgctgaatggttctgggatgcaataaccgaaagagttaaggctgaatatgccttcgcaatattcaaacgcagacacatttatggagaagcagcatgagcaatatcgttgaattcgttaaacagcaggagcagttattctgcggagcattgactgaacagacggtgacatgggctaaggaaagccagtttgcaattcagtatttccagaaaaatgattacctggctaaaacggcactggcaaatccaaccagcgcacagaacgccatcatcaatgttgcggcgatcggcatcaccttaaacccggctagcaaactggcttatctggttccgcgcgacggcatggtgtgccttgatatcagttatatgggattgctccatattgcaatggagtctggtgttatctcatggggtcaggcaaaacttgttcatgctaacgatacctatgagtcaaacgggcttgataaagcaccaacccataaatacaacgccttcggtgatcgtggtgatatcgttggcgtttactgcacagttaagacgccagcaggtgattatctaacggaagagatgagtctggctgaaattgaggctgtaaggaaaacaagcaaggcggcattcagcgataaaggaccatgggtaaatcactggaatgagatggcgcgaaagacggtcgtaaagcgtgcaagcaagtattggcctaaggcatcacgtcttgatagtgctattcacgtactaaacgaagaagaaggtgtgtggactgaaccagttatgccgcacaaatcagaggaagatatccgcgaagatgaacggaaacgccagcaggaaataacggataaagcacaacttctttgtgatgaaatggatcaggcagaaaacatggatgatttgaagcgatattttgcagaagcatatcgcctgacatctggaatgaaattgcagcagaacgtacaagccatttacatagaatgcaaagcgaaactggaggttgccagtgagcaaactgtatgaaattgccaatgaatacgcaaaattgatggattcagatttagaaccagagatgattgctgacacaatagaaggcatggaaggagaatttaccgataaaatagagcaacttctttccgtcattaaaaatgaatctggttatgctgaacgcctcaaggaagaggcaaagtcactgaatgagcgagccgcagtaattcaaaataagattgacagcatcaaatcatatatagcgtcatcgcttgaaatggttggcaagaaaaatattcgagcaggtattcaccaggtaacaatccgcaaaccgtcagaaattgtagaaatcatcgactcaagcgcccttcctcctgaatacgttgagttcgaaacgacaattaaagccgacaaactggcaatcaaacaccaactaaaagcaggaataaatatccccggtgctcaactcaaagttgggaaaccttcacttcttatcaaataacggtatcgcctatgaaaaagactccatgggagaaatgggaagtcgatttcttgcgcgaagtagcggcgacaatgccagttgaagttattgctgaaaaactggaaaggactgaaaaagcagtaatggcgaaagcaacaaggattggcgctgacattgttagccgacttcgtggaagacgatggacaagagccgaagtatcacttttcggtaagttctccgcagaagaaatagcaattgcaacctgccgctcaatttattcagtaagggctatgcgatacaagctaaaaaaactcgatgaagaaagagcaggcatacgaataaattaacaaagaggaatttaccatgagaggacttgcatacaatcccggcattcttccggcagaaatgattattcgccaacgcgtaaagccaatgccatcgagagaggaattgctaaagagaaagagtttcggttctgttaatgacaacaaatatctgaatgcgatgtggcgtaaaggaggcaagcagtgagtaattccgcacgactacagcttggtttttcaccgctatcaaaaactatcatgctggcaaaaatgcgcgatgttgaaggtggacgtatgcgcgttggcaatgatccaggtcgtgatgcacgaagaaaagacaataacaatcctcgcactcgcggggatttcttttatctgaactcgctacggcgggttttgttttatgtagatgataaatgcacttcagagtcacaggtgaatggaatggagagccattcaacagagttatcgaagcagagaacatcaacgactgctatgaccactggataatatgggcgcagatagcacatgcagacataaccaatattcgaattgaagaactgaaagaacaccaagccgcctgatggcggtttttttattggagacaagaaatgtcagatttggctatgaaggttttgaaatggcaatcgactggcgatgttggcatcagtagcgcaactcttgcctcaatcgcatgtggactgaaaaagaatatctatggtcatagcttcggtgctccacatgacgcagccgatttccgacgatgcgttgcgcttgtcgagcagattccagaaatcagagattcattcgacaaggttgcaaagcgcgttccggcattcaaaggcatcctcaacgaatgggattctctcgttgctctgttgaagtctgaaatgaagatacacggaaacaaagcgccagagacttacagaagaatcagcgagctacgcaaggactaactatggaatcacacggcctcacactcgatgaggcctgtcagtttctcaagatatccagacctaccatcgccgcatcaatgcggttttttattacctgatttgcaggttcgattccctattcggagatagcactcatgcaacacgaactacagcctgattccctggttgatttgaaattcatcatggctgatactggctttggtaaaaccttcatctacgaccggattaagtccggcgacctgccaaaagccaaagttatccacggacgagcaagatggttatatcgtgaccattgtgaattcaaaaataagctcttaagccgcgccaatgggtaaaatagcgggtaaaatatttctcacatctaaaaaacaccattccaatcaatcccctgccacctcaagtagatgtctgcaggggacaccatccttgtgtttatccctaaaaccacataaaaaccgtaaattaaattcgaactagcaggccgaataaggcacaccaggaactcgtggttttattcattatgaagtggtttttacctgttctcttagccagataataaacgcttcaatttttggccactgcctgcccggtaatgtggtgatgtaataatgctgatggcatttcaccgtcatatcgccaaacggcgcgacgagctcaccactggcaagccttttttgtaccaggcgttttcttcccatcgccaccccaatatgattcatcgcggcaataacagctaaatcagaacgatcaaagccaattccagaagatgtcggcaaattaaccgcataatgttgcgcccaactatgccattcatccgtaccggagtcgttgctccatgcctgtctgtcatggagcaacgtacagtgacacaggttaattaccgtgttggttaaagcatgtctttgagcgtattccgggctacatactggcaggatttcttcatccatcagaaagtgatgagtgagttgcgctgacggcgcatcatcaaagtagatcgccaaatcgattccggcacgttgcagattgacgttgtcattaccagtgagcacggtgagcgaaatagacggataccggcgtgtaaagtcacctaatgcgggcaccaaccagcattgggcgatagagggccgggaatacagagttaacgttcccgataactcctgatttttgatatcaagaatttcctggttcagggtatccagcgacgattttagcgcccaataaacacgtttcccctcgtgcgttaattccactttgcgatgggaacgaacaaacaactgaatgcccaattcttcttccagctgattgatacggtgacttaccgcactggggctcagcgacaattcctctgccgccagggcgaaggactgatgcctggcagccacttcaaaagtatgcatttttgataattgccagccgttaagcagccgatttcttatttcacgaaggggttccataatcacctcatttttcgcttaagtgtaaaaaaatagcggcaaaatttcagctatgagatgagctaaagtgaaccatatctcaattcaccttcatttttagatgtaaatcactccattgatgcaatttacctcatgtgaaaggcaaattttatcgtttgtcagcctgcgttgtttttttgtccaatatcatcaggttaatcacaggggaaggtgagatatgcactctcaaatctgggttgtgagcacgctgcttatcagcatcgtgttaattgtactgaccatcgtgaagttcaaattccacccgtttctggcgctgttgctggccagcttcttcgtgggaacgatgatgggcatggggccactggatatggtaaatgctattgaaagtggaattggcggaacgctggggttcctcgcagcggttatcggccttggcacgatactgggaaaaatgatggaagtatccggggccgcagaaagaattggtctgacacttcaacgctgccgctggctttcagttgatgtcattatggtgctggttggcctgatttgtggcatcacgctgtttgttgaagtgggcgtcgtgctattgattcctctggctttttcaattgccaaaaaaaccaatacctcattattaaagcttgccattccgctatgtaccgcattgatggcagtgcactgcgtggttcctccacatccggctgctttatatgttgccaataagctgggcgcagatatcggttcggtgatcgtctacggtttgctggttgggctgatggcatcactgatcggtggcccacttttccttaaatttctgggtcaacgactgccctttaaacctgtacccacagagtttgcagatctcaaagttcgcgatgaaaaaacactaccgtcattaggcgcaacgttattcaccatactgctacccattgcgctgatgttggttaaaacgattgccgaattgaatatggcgcgtgagagtggtttgtatatcttggttgagtttattggcaaccctatcactgccatgtttatcgccgtgtttgtcgcctattatgtgttgggtatacgccagcatatgagcatggggacgatgctcacacatacggaaaatggcttcggttctattgctaatattttgctgattatcggggccggaggcgcattcaacgccattttaaaaagcagcagtctcgctgatacgctggcagttattctctccaatatgcatatgcacccgattcttctggcctggttagtggctcttattctgcatgcggcagtgggctccgctaccgtggcaatgatgggggcaacggcaattgttgcacccatgctgccgctgtatcccgacatcagcccggaaattattgcgattgctatcggttcaggtgcaattggctgcactatcgttacggactcgcttttctggctagtgaagcaatattgcggcgttacgctcaatgaaacatttaaatactatacgacagcgacatttatcgcttcagtcgtcgctctggcgggcacattcctgctgtcatttatcatctaagcgcaaagagacgtactatggaaaacgctaaaatgaactcgctcatcgcccagtatccgttggtaaaggatctggttgctcttaaagaaaccacctggtttaatcctggcacgacctcattggctgaaggtttaccttatgttggcctgaccgaacaggatgttcaggacgcccatgcgcgcttatcccgttttgcaccctatctggcaaaagcatttcctgaaactgctgccactggggggattattgaatcagaactggttgccattccagctatgcaaaaacggctggaaaaagaatatcagcaaccgatcagcgggcaactgttactgaaaaaagatagccatttgcccatttccggctccataaaagcacgcggcgggatttatgaagtcctggcacacgcagaaaaactggctctggaagcggggttgctgacgcttgatgatgactacagcaaactgctttctccggagtttaaacagttctttagccaatacagcattgctgtgggctcaaccggaaatctggggttatcaatcggcattatgagcgcccgcattggctttaaggtgacagttcatatgtctgctgatgcccgggcatggaaaaaagcgaaactgcgcagccatggcgttacggtcgtggaatatgagcaagattatggtgttgccgtcgaggaaggacgtaaagcagcgcagtctgacccgaactgtttctttattgatgacgaaaattcccgcacgttgttccttgggtattccgtcgctggccagcgtcttaaagcgcaatttgcccagcaaggccgtatcgtcgatgctgataaccctctgtttgtctatctgccgtgtggtgttggcggtggtcctggtggcgtcgcattcgggcttaaactggcgtttggcgatcatgttcactgcttttttgccgaaccaacgcactccccttgtatgttgttaggcgtccatacaggattacacgatcagatttctgttcaggatattggtatcgacaaccttaccgcagcggatggccttgcagttggtcgcgcatcaggctttgtcgggcgggcaatggagcgtctgctggatggcttctatacccttagcgatcaaaccatgtatgacatgcttggctggctggcgcaggaagaaggtattcgtcttgaaccttcggcactggcgggtatggccggacctcagcgcgtgtgtgcatcagtaagttaccaacagatgcacggtttcagcgcagaacaactgcgtaataccactcatctggtgtgggcgacgggaggtggaatggtgccggaagaagagatgaatcaatatctggcaaaaggccgttaataacgtttcaacgcagcatcgcaatcctttccctgggtgagcgatgctgccgatggcgcagacttaagatccccggtcttacccgctataaccccctccttttatcatcacccaacgcctttcgctgtaaacggcggtttcgcaaaccaaaccaaaaccgtaagtaagataaaagcaatagccgccatacggaaaatctcatttgcagaaatagaaagtgactgctgggttatttcattattaatttcattaagaactcctgaaagcgaaccataatatttatccataatttgtgacgatgaattaaacacggggttaaattgatcgatggttgctgtcaactgactatggtgtaacgattcgcgtcgtccccacagcgtcattgtcaacgacgtaccaactgatcctgacaaggtacgaaaaaaattactcatactcgaggcattggcaaatttattatctggcaagcctgaaaacgaaatcgttgttaagggtaaaaagaaacaggcaacggcgaatccctgaaaaaactgcggcaaaatgatgcctgtaaaatcaatcgttggcataaatgtcacagaacgccagtaatagcaaaccgcatacatcaaaaaactaaatgtcactaacaaccgcatgtctattttgttgccataacgtcctatcaaaggtgaaattaatagtggcatgatgccgatgggcgcataagcaagtccggcccatatcgcattataccccatcgtttcctggagtaactgcggcataaggacgatcgctccagagtaaaataaatacgcgcatgtgatactcacaataccaatggtgaagttacgggacttaaacaaactgagatcaagaatcgggttctctgaggtcgactcccaaatgactaaagagatcagagaaataactgatactactgttaatattattattgtactcgagttgaaccaatccagatcgcgccctttatcaagcataatttgcaagccaccaacaccgagcactaacagggtcagtcctggtagattcattttgaccggtgaagtctcagtttctcttcctttaagtaaggttaagcataatgtcaggacgataatccccatagggacattgattaaaaatatccaaccccagctaaagttatcacaaatataaccgcccaatatcggcccacatatcggagcgataatcacggtcattgaccataatgccagagcaaatgttcttttttctggcggataattccttaataataaactctgtgacagtggaattaacggccccgccattaacccctgaacgactctaaaaaatatcagcacatcaagattggtcgataggctacacattaatgaagacagcgaaaaaaaagtgactgaaagtaaaaataatcttaattcgcctattctttgtgccaacctgccagtaacagggatcgcaatggcatttgctacaccaaacgaggtgataacccaggtgccttcgtctgttgatgctcccagaaagccagatattgtcggtattgcgacgttagaaatagtggaatccaacatttgcataaatgtcgctaatgacaatgcaatagtgacgcaccataacgtcccaccggttaatggtgccggagttgatttagtgattgccattaaagttgtccattatgcgaaataatgttgctaatttctttttctatcggactggtatcgataactaaagccttactggtataagccggcatggaggtcacggttgaagccagctcaggcatctcggcaatgtcttcgttcttcgtatcaatagttgctgtcatcgataaaccaatacgcaaggggtgttccatgagttcttttggatcaagagaaacttcaaccggtacacgctgaacgattttgatccagttccctgtcgcattttgtgcaggtaataaggagaacgcattgccggttcccatattgatccctgtcacccgaccatgaaacacaacattttcaccataaagatcgctgataatattgaccgattgaccaatccgtacatccgtgagttgtgtttctttaaagttggcattaacccacatttgacgtgccggtacgacagccattaacgattgtccggggctcactgtttcgccgacctgaacacttctctgggcaatatagccggtaaccggactcttaatatccgtacgtttaagcgccaaccaggcttctttagttgcatccgccgcttcaacgacttgtggctgacggtttaatggtgtgttcattactaaagctttattcgctttataagcctggatagcggcattcaatgccgctttgctacttattaacgtatctttggtatgctccagcgtttcttttgaaataaccccctgcttcgctaacggcactcgacggttataatcttctaaagattgttgatactgaatacgtgctgaagcgacttcggcactgtattgtttatcctgtaagtatagtttattcgtttgccgaacaatatttgccagattatttttagctttattgagtgcgatagtggcatcagttttatccagtgaaactaaaatgtcaccttgtcgaacgtagttcgtatctttatgattaacgacagtgacactacctgagacttgtgcagaaattggatctgcattccccgtgacataggcgtcatctgtactaatcatgtcttctaattccattgaccaataggcataggcacctgaaaacgcaataaataaaactaccgccaataaagaaaagtattttcttctgttagaatgttttttatttgaattaatctgttccactattatctctcatttctcatagatgaaatttatgaattgaatgaaaagagcattcattcttcatatcaaacacagtgcatgtgttgcacattatcccaggaacgttggaggcctaatttaaatgaggtgcaaaaaaacaacagaggactaaaccgtggcttttgcaatacaattcttacgcctgtaggattagtaagaagacttatagtgccaacttgaaactataaatcatcggtacaatccctgattttattgttgacatttcatttatgccgactatttatatggtatacttgtcgaattatcttaaaggaagctcagattttcttatttttattgagaaaatgagatgacgccttatgtctgtattactacagggagaagggagatgcttcattgcaaagggaataatctatgaacgcaataattattgatgaccatcctcttgctatcgcagcaattcgtaatttattgatcaaaaacgatattgaaatcttagcagagttgactgaaggcggaagtgccgttcagcgggtggaaacacttaagcctgatatcgtcatcattgatgtcgatatccccggagttaacggtatccaggtgttagaaacgctgaggaagcgccaatatagcggaattattattatcgtctccgctaaaaatgaccatttttacgggaaacattgtgctgatgctggcgctaatggtttcgtgagtaaaaaagaaggcatgaacaatatcattgcggctattgaagctgcaaaaaatggctactgctatttccccttctctctcaaccggtttgttggaagtttaacgtccgaccagcaaaaactcgactccttatcgaaacaagaaattagtgtcatgcggtatattcttgatggcaaggataataatgacattgctgaaaaaatgttcatcagcaacaaaactgtcagcacttataaaagtcgcctgatggaaaaattagaatgtaaatcactgatggatctttacacattcgcacaacgtaacaaaatcggctaaccacatgaagtttttaccctatatttttcttctctgttgtggtctttggtcgaccataagtttcgcagacgaagattacatcgaatatcgtggcatcagtagtaacaaccgtgtcacacttgatccactacgtctgagcaacaaggaattacgttggttagcgagcaaaaaaaatcttgtgattgcagtacataagtcccaaacggctacgttgttgcataccgattcgcagcaacgggttcgtggtattaatgctgattatttaaatcttttaaaaagagcgttaaatatcaaattaacactccgggaatacgcagatcatcaaaaagcaatggacgcgcttgcagaaggtgaagtcgatatagtgttatcacatttagttacttcgccgcctcttaataatgacattgctgcaaccaaaccattgataattacctttccggcgctggtaaccacccttcacgactcaatgcgaccgcttacctcaccaaaaccagtaaatattgctcgggtagcaaattaccccccagacgaggtaattcatcaatcatttccaaaagcaacaattatctcttttacaaatttatatcaggcattagcatccgtctcagctgggcacaatgattactttattggtagtaacatcattaccagcagtatgatttcccgctatttcactcactccttaaatgtagtgaaatattataactcgccgcgtcaatataattttttcttgaccagaaaagaatctgtcattcttaatgaagtactcaatagatttgttgatgctttaacaaatgaagttcgctatgaagtatcacaaaattggcttgatacaggaaacctggcctttctgaacaaaccattagaactcactgaacatgaaaaacagtggattaagcagcatcccaatttaaaggtgctggaaaatccttactcgcccccctattctatgacggatgaaaatggctcggttcggggcgttatgggggacattcttaatattattaccttgcaaacaggtttaaatttttctccgatcaccgtttcacacaatatccatgctggaacacagcttagccccggaggatgggatataatacctggcgctatttatagtgaagatcgagaaaataatgttttatttgctgaagccttcataacaacgccttacgtttttgtcatgcaaaaagcgcctgacagtgaacaaacattaaaaaaaggaatgaaagttgccattccatattattatgagctgcattcgcaattaaaagagatgtatccggaggttgaatggatacaggtcgataatgccagcgctgcatttcacaaggttaaggaaggtgaacttgatgctctggtcgcgacacagctaaattcgcgttacatgatcgatcattactatcctaatgaactttatcattttcttattcctggcgttccgaatgcatcgctttcgttcgcttttcctcgcggagaaccggaacttaaggatattattaataaagcactgaatgcaattcccccaagcgaagttctgcgcctgacggaaaaatggattaaaatgcccaatgtgaccattgacacatggaacctatatagcgagcaattttatattgttacgacattatccgttttattagttggcagtagccttttatggggattctacctgttacgctcagttcgtcgtcgtaaagtcattcagggtgatttagaaaaccaaatatcattccgaaaagcactctcggattccttaccgaatccaacttatgttgtaaactggcaaggtaatgtcattagtcataatagtgcttttgaacattatttcactgcggattactacaaaaatgcaatgttaccattagaaaacagtgactcaccctttaaagatgttttttctaatgcgcatgaagtcacagcagaaacgaaagaaaatcgaacaatatacacacaggtatttgaaattgataatggcatcgagaaaagatgcattaatcactggcatacattatgcaatcttcctgcaagtgacaatgcagtatatatttgtggttggcaagatattactgaaacgcgtgatctaattaatgcactcgaggtagaaaaaaataaagcgataaaggctaccgtagcaaaaagtcagtttctggcaacgatgagtcacgaaataagaacaccaataagctctattatgggcttcctggaacttctgtcgggttctggtcttagcaaggagcaacgggtggaggcgatttcacttgcctacgccaccggacaatcactcctcggcttaattggtgaaatccttgatgtcgacaaaattgaatcgggtaactatcaacttcaaccacaatgggtcgatatccctactttagtccagaacacttgtcactctttcggtgcgattgctgcaagcaaatcgatcgcattaagttgcagcagtacgtttcctgaacattacctggttaagatcgaccctcaggcgtttaagcaggtcttatcaaatttactgagtaatgctctcaaatttaccaccgagggggcagtaaaaattacgacctccctgggtcacattgatgacaaccacgctgttatcaaaatgacgattatggattctggaagtggattatcgcaggaagaacaacaacaactgtttaaacgctacagccaaacaagtgcaggtcgtcagcaaacaggttctggtttaggcttaatgatctgcaaagaattaattaaaaatatgcagggcgatttgtcattagaaagtcatccaggcataggaacaacatttacgatcacaatcccggtagaaattagccagcaagtggcgactgtcgaggcaaaagcagaacaacccatcacactacctgaaaagttgagcatattaatcgcggatgatcatccgaccaacaggctattactcaaacgccagctaaatctattaggatatgatgttgatgaagccactgatggtgtgcaagcgctacacaaagtcagtatgcaacattatgatctgcttattactgacgttaatatgccgaatatggatggttttgagttgactcgcaaactccgtgagcaaaattcttccttacccatctgggggcttacagccaacgcacaggctaacgaacgtgaaaaagggttaagttgcggcatgaacttatgtttgttcaaaccgttgaccctggatgtactgaaaacacatttaagtcagttacaccaagttgcgcatattgcacctcagtatcgccaccttgatatcgaagccctgaaaaataatacggcgaacgatctacaactgatgcaggagattctcatgactttccagcatgaaacgcataaagatctacccgctgcgtttcaagcactagaagctggcgataacagaactttccatcagtgtattcatcgcatccacggtgcggctaacatcctgaatttgcaaaagttgattaatattagccatcagttagaaataacacctgtttcagatgacagtaagcctgaaattcttcagttgctgaactctgtaaaagaacacattgcagagctggaccaggagattgctgttttctgtcagaaaaatgactaaatagcggctcccacaatgttcaaatgtgggagctatttaccagcacatcttacatttatgatgagaactcctggcgaatttgttccccatgctggtcgagcgttgccgctcccggcataacatgcgggtccgcgcagccgctgatttttatcggattacccggcatcattattcccccggcttcaatcaacatatttctcgcctgagtttgtggcaatttaatggcctcagccacacttaataacggcgcgacgggtacaccaacttcatgtattctggctaaccaaacttcagctgcctgcgtttttaacgtccgctcaatatattgtttaagaatagcctggttttgtacgcgtaaaatattgctgctaaatcggggatcattaaccagttccgtaagctccagtgcctggcataacgcagaaaaaagcttgtcattaccacaacaaatcgtaatcggcttatcctgagtattgaaaacatcaaaaggtgccatgtagggatggcgatttcccagacgttgtggtgacttcccagttgcgatatatgccatcagaccatgctccagaaaactcagcgtggcatcaaacatcgctatatcgacatgcgcccctctctggctcttttcgcggccataaagtgcactcactattccgctgaataaatagacaccgccgcatagatccgcaagagatgtaccaacgcgcactggcggagcatcaggatatcctgtttccatcattatcccgctcattgcctgaatgatggtatcgtaggcaggagcatcttttagcggaccggtatgtccgaaacctgacgatgaagcatatatgaggcgcgggttgatttcttgaagcgtttcccatgaaaaccccagtttttccattgtacctgggcgaaaattctcagctaatacatcagcttgtttgagcatatttataaatatacttttatcgtgatcattctttaaatcaagaaccacactctctttgccatgattaataaaactgtaatagagtgactgtccatccacatagggaccaaatgtgcgggtatcatcaccatgacccggcggctcaactttaattacccttgcgcccatattacaaagaagttgagttccgaaaggtccattaaggacatgtgtcatatcgataactaataagccttcaaacggccctttgctttcattatttgtcatttgcttatgccttgaaaaaagccgaaggtgaaaagacacttcggcatttatgtaaaatcaataacatgattaattatgaaaccagtcgactgacataaatccacaagggagccgtgacgacaaagcccagtacgctcacagccaatgacgctgtaccagtacgggtgtagacattaaaccggctggcaataatgattccggagaatgccggcggtaatgcgcctgccagtaccatcatctgcagatgttcgctgttcaaatgacatgccataccaacgagaagcagtgccagtggcatcagaatcagcttcaggaaggtgttataagcaatttcggcactgaactcgaatttatgtgcagccagagtcaaccccgcagcgaataccgctacccctgagttagccttcgcaatcagattaaaggttgggtcccatgctgccggaatttttaccccaaccaacaccaggatcgttgccagaacaggtgcccatactactggctcctttgccgcagaaattaatgcgctcagattactattcttcttaccatccgctcctgaagaaggattcagcaaatacagaccaataggaatagtaattgcgttaacaataatagaaataattgctaccactaaacctgttgatacggaatcaccataaataggatcgagaactgcaaaccccaggaatccaatggtaggtgaacctgcaattaatgcacatacagctgcttctgcatgggtacgtttaaaaaatttgtagcaaccgaaccaggagaaaaagaaacatccgacaataaccacaagtgatacaagggtcagacgagtgtccgcaaaaatcatttccctgtttgcccgagtaatagatacaaatagagccgcaggaagcgcgtagtttaataccagtttattaaatgcccgagcttgatcttctgaaaatgtttctcgtctgccgctaaaataacccaacagcatgattacgataataggcaataaatcgccaataaaaaatgttagcataatagtatttccgataagggtcccctcaccatcgcataatgagttggcaagaggagacgatgtcagtatttaattaccagcgacttgttttgggttaagtttggtaatatggccactttcagttcctgctgcagggtcgatgaccacattaataatggtcggtttgcgcgactgaataccggtggttaaagcatgacgaagttcatctgtcgtggtgacgttatagccaacgccacgaaacgcatccattaatttgtcataccttgcatggtgcaacagatccgttggtgatggtgcaccagcgccactgagatcaacaccgtctcctctgtagatgccgccattattaaaaataacgatcgtcaccggcaggttatatcgacaaatcgtttcaatttccatcccactgaaaccaaaagcactatcaccttcaatggcgacaaccggagaaccagaagtcacgctagcaccgatggcatagcccataccgatgcccatgacaccccaggtaccacaatccagacgacgacgtggtttatacatatcaataatatttcgtgcattatccagggtatttgcaccttcattaactaaataaatatcctggttctcgcgcaatacgtcgcgcacagcacttaatgcattaaagtaatttaatggttgagtatctgtacttaatttttcatgcattttttgtgcattttgctgcttgtggatatttaaaatatcgcgccataccagtggagtcgtaaatgtgttttgtttcagttctgccagcataccttgcatactggatgcaatatcaccaacgactggcacagcaatggggcggttgctgtcaatttcctgcggttcaatatccagttgaataaactgtgtatctgccgcccatccttttttaccgtgtgccaataaccaattcagtcgtgcaccaacaagcatgacaacgtcagcatttgccagggcaaacgaacgcgcagctgccgcagaaagtggatgcgtatcttcaaggatccctttcgccatagacattggcaggaatggaatctgagcactttcaataaattcacgaagctgttcatcagcttgtgaatacgccgcgcctttgccaaggataattaatggccgttcagcttttgctaaaagcgaaattgcgctagtgactgacttcgggcatggcaataatgctggcgacggattttcaactttaacaatcgtggttaacgcttcgtctttttccatcgtcgcggccaggacatttgctggcaaatcaagataaactccgccagggcgacccgatacagagacccggatagcgcgtgccaatgcaatgccaagatcctgcggctgattaacgcgaaatgctgctttggcatacggttttgccgcattcatttggtccagctcttcataatcaccttgctgtaggtcgacgatcgcgcggtcgctggagccgctaatcatgatcatcggaaaaccatttaccgttgcgttggccaatgcggtcaaaccattgaggaatcctggcgcagaaactgtcaggcagatccccggtttttgggtaagaaaaccgcttgccgcagcggcatagcctgccgactgctcatgacgaaaaccaatataacgaatgccttccgcctgggcatggcgtgccatatccgtcacaggaatacctacaacaccataaatagtgtcaatattattctgttttaatgcttcaacgatgatatgcataccatctgtcatttgaagttgatctgacatgattaataacctcgaaatttttataaattgggagccagaagcccccgttaatatcagatggcgtggttttgcttcattgcagcaatttcatcgtcgctataacccagctcctgcaatacagcagcggtatgttcacctaatagcggcgcagctttaatatccggcgtaaaggcagagaatttcattggacaaccaacggtcagatattttccacgcaacggttgttccacttcaacaacactgccactttggcgcaaagagggatcaagtgaaatttctttcatacttaaaaccggtgcacaaggaatatcaaactgagtcaaataggccaccgcttcatgtttatcaatagtgacagtgtatttttcgatttcagcaaaaatatcgaaaatatgtggctgtcgtgcatgggctgtactgtatgccggatcggtaatccattctggtttgccgatggctttacaggtgttttcccagttttgctcctgaatagtgaaataaatataggcgttaggatcggtttcccagcctttacatttcaggatccagccaggctgaccgccaccacctgcattaccaccgcggggaactgcatcaccaaatgtaccattcggatactgcgggtattcttccagataacccaatttatcgagacgctgctggtcacgtaatttcacgcggcaaaggttcaatacggcatcctgcattgacatggtgactcgttgcccacgccccgttttttcgcgatgcagcaaagcagcaagtaaaccgatcagcaaatgcattccggtgttgctgtcacccaacgctgcagcgcttaccagcggcggaccatcccaaaaacccgtagtggatgccgcgccacccgctgcctgagcaacgttttcataggcttttacattcacataaggcgaacactcatcaaaccctttgatcgaaccaaaaatcagacgtggattgatttcttgaatatgctcccaggtgaagcccatgtgatcaatggcccctggatgaaagttctcgactaagatatcagcttcgcggatcagcttttccattacctctttgccttccgctgttttggtatttaactcaatagaacgtttgttactgttaagcatggtgaagtaaagcgcatcgatatcaggaatatctcgcagctggtgacgcgttacgtcaccaacgccgggacgttcaattttaataacgtcagcgccaaaccaggccagcatttgagtacaagatgggccagattgcacaccggtgaaatcgagaactttaattccttgaagtggagttgacatagcaatacctattagttaattaaatatgtgttaatttagcgtttatttaaggcgtaatatcttctataaataacccgcaaaatatcgtcgtagctgcactcgatatttttaaaatcctgtatcaagtgctgaaaatcatttcatcgccacttccaattcctttctgcatggtaagtagtgaggacgaaaagaagaatatgataaatattgattcgtggtaatcagagagagtcgcgacatttgtgatgttattcttacaactgtaagaagcgccggtgatttacaagcaagggtatgattacgctttttaaagcgtaccataaaacataacataataaatgatttgtgatgacacgggattattgcggtttactttgaggaatataaaatgcgagtttatagcaccgcgagcgccaaataattttatgaccacaacctgtcgtattgtggtcataaaaaattgtcggctggagggagttaaatcctttacctcaatatactgcctgtcagcattagttcacaaacagtgcttcgctatcgacgatgattccatcttccgcacctttaagcgccaggtttgcctcgtagtattgctttttatcaagcagtttctgcgcatcagcaagtgcattacgagtctgtttaagtggcatcagatattggttttccattacgccaacaccggccaggcgaagctcttccattgcgccctttttatcccctttcgccattttttcattggcaatttttatcgcggcttctttttcgggagttgctacataactctcagaaattccgacagatgcattaatgacaatatattggtcatcattgagattggtctttttacctggcttagcgaactttgcccattcggtactgtcatctgacagcaaagcggaagcttcattggtcagttcttttgccttttctggatcgccatgaaacagagccaggcgcgctacctgcacgtcacgcatcgcatataaaccttgttcagagatacgctctgctgccgctgccgttttctgggtttgctgaacttgctgagtttgctgttgtgccgctaccggagcattatcagcagcccatacagttgaagatgccagaattgctgtgaccatcgtggccataattaaacgtttcatacttacctcattctttaacagttttagaaaacgccgccatcatattgggtgagcatgaaatgagaaatcagagagcaacggtcattttgaaagggttatcttacagttgtagttattatcgcaagaagtattttagtcttacaattgtaggaatatgcttcctgtcgcagagaactattcttatataccacaaagagatgtcatttattatatcgatgtaaatactgattaattaaatgtaaatacagccataacatcgtaggttctcagtgaaccattttcaggataactttctatgaaagtaaacttaatacttttcagcttatttttattggtctctattatggcatgcaatgtttttgcattttccatttcgggtggtggaagtgagaggagctataaagagactgaaaaaacatcagcgatgacgaccacacactctacaaaacttcagccatcacaggcgattttgtttaagatgagagaagatgcgccaccattaaacctcacagaagaaatgccgcccccttttccgacaaaggcgaattatcttattcatcctgtgcgatagcgtctttcacatggcaggtgaacaatcatgtctgatgctgatgtgaacacctgcccaaatgagccatcctgacccactaccgcctgccataccccaccataaagcgaatcatcaagccacaagccggggcaagaaacataaatatccccgtcactagttcattaccgccagttaaccacatggtgaagtaataaatgagtgcagcgaggatcaccatgccgaagaaagaagagaccgccgataccacgttcagtacctgaccgatgtagccgcttacgcagacaatacacagggcgagaaacatccataaattaatcatagctcaacctcctgccgcgctaaaaaacctgtaacttcagtcactttaatagtaagacaatccttaacctctggcaatttttgctaagcatcaatgaaaacagcatgttaaatgcaagactgttgtgtacggaaaaatatttactttgcacgattaataatcagtagctgaaagcagtcagcgagtgataaagtacagataccgccttcatgctcctcgtggttatgtcctgactagtctttacactctttacaggaaccattgtcgtacatgatggcccaaccaattgagtgtaccgctgtcgacatggaatcttctgcgatacaacaattcgtatctacagaaggtaactatgtttccacaatgcaaattttcccgcgagtttctacatcctcgctactggctcacatggtttgggcttggtgtactctggctttgggtacagcttccttatcctgttctctgctttctcggcacgcgtattggcgcaatggcgcgaccattcctgaaacgtcgtgaatctatcgcccgtaaaaacctggaactttgtttcccgcagcattctgcggaagaacgcgagaagatgattgccgaaaactttcgttcactcggcatggcgctggtagaaaccggcatggcatggttctggcccgacagtcgcgtacgtaaatggtttgatgttgaagggttggataaccttaaacgcgcacaaatgcaaaatcgcggcgtaatggttgtcggcgtccattttatgtcgctggaactgggcggccgcgtgatgggactgtgccaaccaatgatggctacctatcgtccacataataatcagctgatggaatgggtgcagacccgtgggcgcatgcgctctaacaaagcgatgatcggcagaaataatctgcgcggcattgtcggtgcactgaagaaaggtgaagcggtatggtttgctcccgatcaggattatggtcgtaaaggcagctccttcgcgccgttctttgcggtggaaaatgtcgccacaaccaatggcacctatgttctctcccgtctctctggcgcagccatgttgaccgtaacgatggtaagaaaagcggattacagcggatatcgtttgttcatcaccccagagatggaaggctacccgacagatgaaaatcaagccgctgcctatatgaacaagattatcgagaaagagatcatgcgcgcaccggagcagtacctctggatccaccgtcgctttaaaacgcgcccggtgggagaatcgtcgttgtacatttaacaaactgctcttactctttccctcctcaaatcggccataataacctcatggtttttatggcttttttcttaaggttttttccttcactgaatatctaattattaccgtcagaaattaaactgtcgccgatatgagacacttgtaagttactaaaagtaaataagaaaatgcctcttgtctcgtttcagttttaggcgtacattagcgccgtctcgagcagtttagctcagaattctggggtgatgcccacggtaaaatacagggcttttaaggtcgctttgcccggtgtcaactcactgtatcaggtgtaatgaagtcattcaggcgtaacagtaattacgcggagagatgtaaagtgaaatatttctttatgggcatttcttttatggtcatcgtttgggccggtacttttgccctgatgatctaaaagcaaactgtgcaatgaaaaacaggagccatcaggctcctgtttgcatttctgacgacggtgtttattccgcgttttcgtgaatatgtttgctgctggcgggtagtaaaccgtcggcacggaacatcgctttaatccctctgatggcctgacgaatacggtcgcggttttcaatcagtgcaaagcgaacatgcgtatcaccatagtcgccaaagccaatccccggcgagacacaaaccttcgcttcgttaaggagcttcttggcaaattccagcgatcccatggccgcatatggttccgggattttcgcccagacatacatcgaagccttcggcatttcaaccatccagcccgcttcatgcagccctttaaccaatacatcacggcggcgtttgtactgttcggcaatgtcgcgcacgcactgttgatcgccctccagcgccgcaatcgccgccacctgcaacggcgtaaaggtgccgtaatcgtgatagcttttaatacgagccagggcgctgaccagcgttttgttgccaaccataaagccgatacgccagcccgccatgttgtagcttttcgacagcgtaaagaactcgactgccacatcgcgtgcacccggtacctgcataattgacggcgctttccagccatcgtagacgatatcggcataggccaggtcatggaccaccagcacatcgtagcgtttcgccagcgccactactttttcgaagaactccagttccacgcattgcgcggttgggtttgacgggaagccgaggatcatcatcttcggtttcggataactttcacgaatggctcgctccagttcgttgaagaaatcgacaccttccaccagcggcactgagcgtacctgcgccccggcaatcaccgcgccataaatatggatcgggtaacttggattcggcaccagcaccgtgtcaccatgatccagcgtcgccagcatcagatgcgccaggccctctttcgaaccaatagtgacgatggcttctgattccgggtcgatttcaacgtcgtagcgatcctgataccagcgggaaatggcgcgacgtaaccgcggaatgccgcgtgaagtggagtaaccatgcgtgtccgggcgctgggccacagtacataatttttcgacgatatgcggcggagtcgcaccgtccgggttacccatgctgaaatcgataatatcttcgccgcgccgacgcgcagccattttcagttcagcggtgatgttaaaaacgtagggcgggagacgatcaatgcgcgtaaagcgacgttcagggcgagtgtcagccataatttcctcagattaacgttagcgcccggaccgtccgagcgacgctgccacgatggtggctgttttgaaaatagcctgattaatttctgtctgtccagcgttttagaacattttattaatgacgttaaatgaggaactctgctttaaaaacaggaaatttatctgcgctaacaagaaaattaccactcattttattaacataataatttcaataaatttactaaccagaagtgcattatcaagagatgcattgctaatacaccatttatctatcaatccccttttaaaattgtggtttttcctcaaaaacggcctgctggtcatcagccttcaggttacctatcatagaggtttaatccttattcagagtcacccgtgcacgaaatattcaacatgctgctggcggtcttcgatcgggcagcgttaatgcttatctgcctgttctttctcatccgtatccgcctgtttcgcgaactgttgcacaagtcggcgcactccccaaaagaattgctcgccgttaccgccattttctcgctgttcgccctgttcagcacctggtccggcgttcccgtagaaggctcgctggtgaacgtacgtattatcgcggtgatgtccggcgggattctgtttggcccgtgggtaggcatcattaccggcgtgattgcgggtattcaccggtatttaattgatatcggcggcgtgacggcgatcccctgctttatcaccagcattctggcgggttgtatatcgggctggatcaacctgaaaatccccaaagcacagcgctggcgcgtcggtattctcggcggcatgttgtgtgagacgttgaccatgattctggtaattgtctgggcaccaactaccgcgttggggatcgatatcgtctctaaaatcggcattccaatgatcctcggtagcgtctgtatcggctttattgtgcttctggtgcaaagcgttgagggcgaaaaagaggccagcgccgcgcggcaggccaagctggcgctggatatcgccaacaaaacgctaccgctgtttcgccatgtcaatagcgagtcattacgcaaggtctgcgaaattatccgcgatgacattcacgccgatgcggtggcgattactaataccgatcatgtgctggcctatgttggcgtgggtgaacataactatcagaatggcgatgacttcattagcccgactacccgtcaggcgatgaattacggaaaaatcatcattaaaaacaatgatgaagcccaccgcacaccagagattcattccatgctggtgatcccattgtgggagaaaggggtcgtgaccggaacgctgaaaatttactactgccacgcgcatcagatcacctcgtcattacaggaaatggcggtcggtctgtcgcaaatcatctccacgcaactggaggtttcacgcgccgagcagctacgtgaaatggcaaataaggcagagcttcgcgccctgcaaagcaaaattaatccccattttctgtttaacgctctgaacgctatttcatcgtcaatccgtctgaatccggataccgctcgccagttgatctttaatctgtcgcgttatctgcgctataacattgaattaaaagacgatgagcaaatcgatatcaaaaaagagctgtatcaaattaaagactatattgccattgagcaggcccgctttggtgacaagctgacggttatctatgatattgatgaagaggtgaattgctgcattcccagcctgctgatccagccgttggtggagaacgccattgtccacggtattcagccttgcaaaggtaaaggcgttgtcaccatcagcgttgcagagtgcggaaatcgggtacgcattgcggtgcgagataccgggcacggcatcgatccaaaggtgattgagcgggtcgaagcgaatgaaatgccgggcaataaaattggcctgctgaatgtccatcatcgcgtgaagttattgtatggcgaggggctgcatatccgccgcctggagccggggacggaaattgcgttttacattcctaaccaacgcaccccagtcgcctcacaggctacgttattgctttgagccggagtgatattgtgaaagtcatcattgttgaagacgaattcctggcacaacaggaactgagctggctaattaaagagcacagccagatggagattgtcggcacctttgacgacggtctggacgtgttgaagtttttgcagcataaccgcgtcgacgccatttttctggatatcaatattccgtcgctggatggcgtgttgctggcgcaaaacatcagccagttcgcccataaaccgtttattgtgttcatcaccgcgtggaaagaacatgcggtagaagcgtttgaactggaggcgtttgactacattctcaaaccgtatcaggagtcacgtattaccgggatgctgcaaaaactggaagcggcctggcaacaacagcagaccagcagtacgcctgccgcgacggtaacgcgtgagaatgacaccattaatctggtgaaagatgagcgaataatcgtcacgccaattaacgatatctattacgccgaagcgcacgagaaaatgacctttgtctatacgcggcgtgaatcctacgtaatgccgatgaacattaccgaattttgcagcaaactgccgccgtcgcattttttccgctgccatcgctcattttgtgtcaatctgaacaaaatacgcgaaatcgaaccgtggtttaataacacctacattctgcgactgaaagatctggattttgaagtgccggtcagccgcagcaaagtgaaagaatttcgccagttaatgcatctttaatcgggaactttcatgaaagcaccaggcttgcccgccgatcaacaatttttcgccgatctgttcagcggcctggtgcttaacccgcaactactggggcgcgtctggtttgccagccagcctgcctcgttgccggtgggcagtttatgtattgattttccccgtctggatatcgtgctgcgcggcgaatacggcaatctgctggaagcaaagcagcaacgtttggtggaaggagaaatgctgtttattccggcgcgcgcggctaatttaccggtcaacaacaaaccggtgatgctgttaagcctggtgttcgctccgacctggcttgggttatcgttttacgatagccgcaccacgtcgttgttgcatcctgctcgccagatccagcttcccagcctgcaacgcggtgaaggtgaagcgatgcttaccgccctcacccatcttagccgttcgccgctggagcaaaatatcattcagccgctggtgttaagtttgctgcatctttgccgtagcgtggtgaatatgccgccgggcaattcgcagccgcgcggcgattttctctatcacagcatttgtaactgggttcaggataattatgcccagccgctcacccgcgagagcgtggcgcagttttttaatatcacgcccaatcatctgtcaaaactgtttgctcagcatggaacgatgcgttttatcgagtatgtgcgttgggtgcgaatggcgaaggcgaggatgattttgcagaaatatcatctgtcaattcatgaagtggcacagcgttgcggttttccggatagcgactatttttgtcgcgttttccggcgtcagtttggtctgacgccgggagagtacagcgcccgttttcagggctaacgtcagaaggttaattctgtttccagcagcgtcaggatactttgtgcatcttgcgcggcaaacaacgactggcggaagtttttattcaccagtttacgcgccagctgcgagaagactttcacatgattcatcccttcgttagcacccagcgtcagcatgatcaccagttcgacttcgcccatttctgactgccagccaatcggtttcgccagccgggcaatgctgatactggaatgacggatccactgagatttggtgtgcgggatcgctacgccaaaaccaacgccggtggtaacaatctcttcccgctgccagacatcttcttccagctcaaacggatgttcagtgcgcccgttaacgccgaggttgccgcacaggaactggatcgcctgctctttattgctaaaatcctgatcaacaaagatattctccagcgccagcagtgggcgaacgtcttcttccggcgtaaaggcggtgagtaacgcttcaatttcctgcgcactgcggcattcacatgcctgacgcgccagttcccgacacgcctcgctatccagttgacgaagctggcttttcaccgccggaatacgcgggctactcatactcagctcatccaggcccagcccaagcagtagcggcagataacggctttcaccgcccagttcaccgcaaatgcctacccatttgccccgctgatgcgcagtggtaactatttgctgcaacatgcgcaggaacgatggcgtaatcgggttatatagcggcgatacgcgcgggttattacgatcgaccgcatacagatactgggtcatatcgttggagccgatactgaagaaatcgacctcatcgcagaagtggtcgatgatgtagcacaccgacggaacttccaccatgatcccaagcgtaatcgtctctgcatgacgcaggccatcgcgcttaagctcaacgatcgctttttggatctcgcctttcacccataagatctgatcgaggctgtgaaccatcgggatcatcaactgggcgttgccgaaactggcggcgcgcaaaatggcccgcagttgagtgcggaacaggccagcaaattccgggtaaatacgtaccgcgcgatagccgaggaacgggttctcttcctggggaatattcagataaggaatgcttttatcgccgccgatgtccatcgtgcggaagataatcggcttgtcgcccgccgccagtagcacctgctggtaggcttcaaattgctcctgctcgtccggcgcgctgtcgcgatccatatagagcatttcggtacggaacagcccgacaccttccgcgccgttggcaaacgcgcctggcgcttccagagcggtgccgatattcgccgcaatatcaatacgcttgttatcacgggaataggccagctgcgcggcagcctgcgcctgttgtttttggcgtttatccgccagcgtctgcgcgacctgataataaccgctcaccgcgtcattcgggttaatcgccagcacgccgcactgggcgtcaagcactgcaggttgcccggcataacgggcaatcgcatccagcggcaagccactcagtaccgggatcgccgaggcacgggccagaatcagtgtatgcgaggtgcgcccggttttctccagaatcatgcccgcaagatttttcaaatcaaggctcaaaaactggcttggggttaaatcttcagccaccagaatggtcggtttttcaagcaccagcttgttgcgcggcttcagttccggccaggtgatatgcagcaactgttcgctgatatcgcgaatgtcgctaacacgttcgcgcagataatcgctggcagaggcagaaagtttggcgcaaacctgctccatattgctgatgatcgccgcccccagcccctgatgctgttctgtcatcaggcgacggatattgcctgcaaattcatcatcctgaatcagcgacaaatgggcgctgaggatagttttgctttcgccgtcacgctcacgcaattgctggttcagttgctcggcaagcgttgccaggctgtgctccagccgggtggaatcttgcgcactggcggggattgcccgataactgtcgaggctgtcgctttgtaacagggtcagcgtacccacgccgacgccgcttgccagcacattgccgtacagtaaatccgggttaaggcggcttaatgaacgcggcagcggatgcgccgtcagttctgcctgcgtaggctgaacgctgtcgctgtcgataaagcgcacctggatgtactcttccagcacgcgccgcgcctgctcttcatcgctgccgctaatgttcaggctgcaactgtcattaaatagggtgccggtgccaatcagcgccagcgagcttttcgcatctgcctttgcgttctggcgatggttaataaaagtgatttcgctttgccactggctgcactgttctttaagttcccacgccggacgagcatgtagaccgttaggcaaaggacagagaaattgaatcgttaacataaccgctccgggttaatcaggagatcatctgaaatccgtcagttgaacaaccgtctcacgcgtaagacgttgaataagggcagataaaagttgctgcatctgcaaaatgtcgcggcaatcggcaatcgatgcggcgcaatgtccatggcgggttgctggccccatcaccactgtgggcacgccggtgccggttaagtgcaccgccccgccgtccgtgccgccgttgctgaacatatctgcctgcaacggcacgccaatttctgccgccacggtttcgacccaggcggtaagttttggcggcgcaatcagcgacttgtcgcttaacaccagcatcggcccgttaccaatctggcgatggttagccgcgccataatcaaagtttttcgcccagcaggcggtatcaagcacaatggcgacgtccggcgacaccgcgcgggtggcagtttgcccgccgcgtaatcccacctcttcgctggaacttgccaccagccacacttccgcaggtagttcggcgtcgtgcagttcgcgcagtaacgtcaccagcagatagcaaccgaggcggtcatcaaaggctttccccatcactcgctggtgagggagaacctgaaaagtggtatcaaacgtgacgcgatcgccgggacgaattcccgcctgcatcacttcgtcataggagcgcgcaccaatgtccacgcgcatggcgctgacgtcattcccctgccggtcgccgtcaagcaggcctggaattttgcactcttcacgggtggtgatgcgcaccggctgcagctggcgggcagccatgcgtacgttgccaaccggcagcacatcaatcgccccttcgcgggagatgctgcgcaccataaatcccacttcgtccatatgcgcacagatcatcaccttcggacctgtcgattcattcaggcggatcagcaccgatcccagaccatcaaatcgcacttctttttgcaggcgatccgcttcttccagcaggatctgccgcacttcctgttccgaggaggcgatcgcatctgcctcgctcaacgcttttaatagcgataaatccattatgcctctcccgtgagcaacactgttttcggcatggcgtagagcacttctgcgccttgcggggtaaccagcacaacatcttcgatgcgcacgcccccttgccctggcaaataaatccccggctccacggtcagtaacatgcctggctgtagcgtcgtggtgtcccgcggtgaaaaacgcggatcttcatgaacttcaatgccgatagcgtgaccggtgttatgaccgaaatagtcgccataacctgcttctgtaatgacccggcgcgcggcatcgtcaacctgctggcagcgcacgccggggcgaatcgcggagattgctgcgagctgtgcctgcaggacaatttgatagacgttaaacagcgggtgagattcggcgctcaccccttcgccattcaccagcaaggtgcgcgtcatatcagagcagtagccctgatacagcgcaccgaaatcgagagtgacaaactcgcccgctgcaacaatcttgtcgctggctttgccgtgcggcagcgccccacgccagccactggcgacaatggtgtcaaaagaggctttttctgcgccctgctggcgcataaaccactccagttcagcggctatctcgcgctcgctcatccccgcctgaataaagcggcgaatatgctctgcaccgcgatcagcaatcccacaggcgaggcggattttctccacctcctctggcgttttgatttgccgcagcacatccggcgtggcgctaaccagtttcgcattgagttcagactgccagcggtgcgcggtttcccaactcacctgctggccctcaaaaccgagcgtttgcaactgttcatcggcaatgatttgattgacgatagtggtaagcgtgttcgtcgcgtcaagcaaatgcagctggtagccttgcgcacgggcttccacctcaacgtaatagcgcgaatccaccagaatgtgcgcactttcacggctaatcaccacataacctgatccggtggagatccccagatgcggctgtttgttctgccgtgaggagagaagcactgcatccagttgttgcgccttaagccagtcgcgcagcgaagcgagtaatgtcatctggattttccttcttacaggctatcgattaacaatttgcctttacggaacatcatcagacgcaggaacaccaccatcagcgcagttatgactgcccccagcgcgatccccgccatatagacgcccaggttagtgaccagcggccatgcccagatagcggactccgggaaccattgcactgcgcccagccagacagcggcggttgagccgacaatagcgccgaccatatacgacggaatggcggtgatggggctttccagcgcaaacggaatcgcaccctcactgatccccataaacgccaggaacatggcggtcttaccctgcggataaagttgagcgttgaacaggcgtttgccggttaaacgacggtcgataatggtcgccagccccagaccaatcggcggaataacgatagcgatagaacgagcggtgaccggtaatacgtggtcagtggtaaagctgaaggcaacaaaacctgcggctttgttgatcgggccaccaaggtcgattgctgtcgccgcggcgatccccattgcgtacatcagcgcgcccttctcacctgcggcagtcagcacagtacggataccgccgttgatccagccaccaaagggggtgatgacgtagtacatcgccagcatgacaaaaatggcggaaagaatcgggagcaaaaatgtggttttgaacgctaacaggaaatccggtaactggattttctggttcatccacttcacaaggtaaccggcaacgatagaaataatcagcgcaccaatgaaggtggacggcaccggcgaagaggtcgcccattgcatagtgctgggatcgaagttcagcagttgcgtcggctgggtagacatcaacccgccgataaaaccagccgggaacgccagtttgccaccgatagagttcgccacaaaagcagcaaacatcggaatggcaaaaccaaacaacacgccgccgaaggactgcgacagccaggcaaatttaagtaaggagaggtcgaaaccggagaatttcccgctattaagagcatccatgatgccgatctcagcaggaattttaagccagctataagcaatcagctggctgaaagcgaggatcacaccgcccataattaaggtcggcaccatgcgtgaaatccctgacatcacatgctgcgggagttcaccccagaagctggttttagaggcctgcggattcttaactgccgctgccgcaccggatgcgccaggcacaacggttgcactgcgttttttaatggccataacaattatccctgtcgaatattactgttgttcagaggcaatcatctcttcgatttctttgatgatgcccgcagcgtttttaattgcgtcctgcaaagtgatttcataaacgtcgcgtgattcgaaacgttcgttatcttccggggtaactgccacggagtggatgatgatggtcgcttcggcgatatcctgcgccgtcaggcgattctggataccgtccgcgccctgggtttcaattttcacttcataaccggcttctaccgccgcttcttccagcgcctgagcggccataaaggtgtgagccaggcccatcgggcaggcacataaggcaatcagtttcttactcatcgttaattcctcgttcagtgatagttgacgagtgaaattatgaacgtgcaaaacaaatcgccgttaccagacaaataatgcatttactggagaattaatcccgctgtacggaagtgtgacgcaggtcgaccttgtgaggggacacaaagaaaaattgaataaactgtatgatttaaaagattatcgggagagttacctcccgatataaaaggaaggatttacagaatgtgacctaaggtctggcgtaaatgtgcaccggaaccgagaaggcccggattgtcatggacgatgagatacaccggaatatcatggacatattctttaaagcgccctttatcttcaaatgcggcacggaaaccggaggctttgaagaactcaaggaagcgcggcacgataccgcccgcaataaacacgccgccaaatgtcccgagattgagcgccagattgccgccaaaacggcccataatgacgcaaaacagcgacaatgcgcggcggcaatcggtgcagctgtcagccagcgcgcgttcggtaatatcttttggcttgagattttctggcaggcggttgtcagctttcacaattgcgcgatacaaattcaccagcccagggccagaaagcacgcgctccgccgaaacatgaccaatttccgcacgcaatatttcgaggataatggcctcttcttcactattcggcgcaaaatcaacgtgaccgccttcgcctggcaagcttacccaacgcttatcgacatggaccagatgcgcaaccccaagccccgttccggcaccgtaaaccgcaataggcttaccttcgaccggttctgcgccaccaaactgaatcagatgctcttttttcagcatcgggatcgccatcgatacagcggtaaaatcgttaataatttccagatggctaaaaccgagattctttttcatttcggcaattgagaacgcccaggtatggttggtcatcgccacccagtcaccggtaattgggcaagcgatggcaatacagccgtctttcacctcgaccttatgttcttcaagataaacgcgaatgaccgcttcgaggctggggtaatcaagccctgaataggtcttagcctgcgagatttcaccactggcaatatcacacagagcaagacgtgcgttggtgccgcccacatcaccgactaatgcatactttgtcattcttcaactgctccgctaaagtcaaaataattctttctcacactgtaaatacctgggggcataacaacaacgccggaaaggcaggctccctgtaaatatcgatctgggtcacacaattactttatcgtttcagcaccaattgcagcgatgcctttttgcaagctgggcaaactaagtatctgaccccgcataaggaatagaacatgctccatccgcgagccagaaccatgttgttattatcgctccccgccgtggcaattgggattgcgtccagtcttattctgattgtggtgatgaaaatcgcctcggtattacagaatttgctctggcaacgactgccgggaactctggggatagcccaggattcacccctctggatcatcggtgtattaacgctaacgggtattgcggtggggttggttatccgtttcagccagggtcatgccggaccagaccccgcctgtgaaccgctgatcggcgcaccggttccgccctctgcgctacctggacttatcgtagcattaattctcggtcttgctggcggcgtcagcctggggccggaacatccgatcatgaccgtcaatatcgcccttgcggttgccattggcgctcgtctgttaccgcgcgtcaaccgaatggagtggactattttagcctctgccggaaccatcggcgcactgtttggcactcctgttgcggcggcgttgatattttcgcaaaccttaaatggcagtagtgaagttccgctatgggatcgtctctttgcgccgttaatggcggcagcagctggtgcacttactaccggattatttttccatcctcatttttcactgcccattgctcattacggacagatggaaatgaccgatattctcagcggtgcaattgtcgcggcgattgccatcgcagcagggatggtcgccgtatggtgcttaccacggttgcacgcgatgatgcatcaaatgaaaaatccggtgctcgtgctgggtattggcggatttattctcggtattctgggggttattggtggaccagtttcgctgtttaaagggctggatgagatgcagcagatggtggcaaatcaggctttcagcaccagcgattactttttgctggcggtaattaaacttgccgccctggtcgttgctgccgccagtggctttcgcggtgggcgaatcttcccggcagtgtttgtcggcgtggcattagggttgatgctgcatgagcacgttcccgccgtaccagcggcaataaccgtttcttgcgctattctcggcatcgtgctggtggtaacacgcgatggctggttaagtctttttatggcggcagtcgttgtacccaataccacattgctaccgctgctctgtatcgtcatgcttccggcatggctgttattagcaggtaagccgatgatgatggtcaatcgtccgaagcaacagccaccccacgataacgtttagcaaaaaatgctctcctttatgatttaagagttatggcgatgatacggggctttacctccccgtaatattgcgttaacaggccgctgacggcttcgagcgtgaaggagaataacaatgttcaggtcactgtttctggcggccgccctgatggcatttaccccgcttgcagcaaacgcaggtgaaatcaccctactgccatcaatcaaattacaaattggcgatcgcgatcattacggtaattactgggacggtggtcactggcgcgaccgtgactactggcatcgcaattatgagtggcgcaaaaaccgttggtggcgtcatgataatggctaccaccgtggctgggataagcgtaaagcgtatgagcgtggctatcgtgaaggctggcgcgatcgtgacgatcatcgcggaaaaggccggggtcatgggcaccgccattaaacgcgtccgccaatggagcacaatgcctgatgcgacgctagtgcgtcttatcaggcctacaaaccggctctttaacgcgtagggcggataaggcgtttacgccgcatccgccaatagtgccagatgcgacgctcattcaactacaatcccagcgccgtccccaccaacaaccagatattcagcgccacgaccagcaccacaatcacccagcctgtctgttttacgcgtttgctgttcaccagatcgcccatcaacttgctgtcactggtgaaaatcagcagtggaaccagcgccagagcgataccaaaacttaacagtacctgactcataaccagaatccgtgtcggatctaatcccatcagaatgacaataaatgacggcaacatggtgactgtacgacgcacccacagcgggatatgaaagcgaatgaagccctgcatcaccacctgccccgccagtgtccccaccaccgttgaagacagccccgcagcaaccaggcttaatccaaagaccgttgccgcagcgtggcttaacagcggttgcagcgtcagataagcctcatcaagatcggcaacaccagtatgaccggaaaagtggaacgccgccgcagctgtagccatcatcgccagattgacaaaaccggcaatagtcatggcgatagccacatcccatttggtggcggaataacgttgttgacgcgaaccgccatgtaaatgctgagtgagcgaggagtgcaaataaatcacatgcggcataatcgtcgcccctaacacgcctgctgccaggaagaccgcttccgaagtaggtaaactcgggatcaccattcctttacccagctgcgccaggttaggctgggagaaaatcaactcgacaatgtaagccgcggcaacaaacaacagtaacccgccaatcactttctccagcggtttttgcccgcgacgttgcagcattaaaatcaggaaagtcgcgatccccgtcagcaccgcgccctgcaacaacgaaacaccaagaatgagtttaaaaccgatcgccgcaccaataaattccgccaggtcggttgccatcgcaataatttctgcctgaacccaatagaaccacactacgggacgcggatagtgatcgcgaatctgctccgccagatttttaccggtggcaatccctagtttggcagagaggatctgaatcagcatcgccatcaggttggcccaaacgacaacccacagtagctgatagccgaagctagcacccgcctgaatattggtcgcaaagttaccgggatcgatataaccaatcgccgcaatgaacgcaggtcccattaatgcgagcctcatcttgcgcgccgcccgtccgctgctactctcaacgcgatagttcgtcatcttgtgcctctaaaacatagcctttgctatgtttcatgccataccaaacgagaatgattatcaaattcatttaaatggattgtggtgatttctctgatagaccaggattatgactacgaaaagattgatgacttgaatgttatggttatgtttaatgttagcacatttacataactttcagcttccatacacaacatagcagaaatgtatgacagatcactatttttgaagcctgtcacaggacgtcattatagtgtgtgtcagatctcgttttccttaaccatgttacatagaatgtgcacggaaatttaacctgcctcatatttggagcaaatatggaccgcgtccttcattttgtactggcacttgccgttgttgcgattctcgcactgctggtaagcagcgaccgcaaaaaaattcgtatccgttatgttattcaactgcttgttatcgaagtgttactggcgtggttcttcctgaactccgacgttggtttaggcttcgtgaaaggcttctccgaaatgttcgaaaaactgctcggatttgccaacgaagggactaacttcgtctttggtagcatgaatgatcaaggcctggcattcttcttcctgaaagtgctgtgcccaatcgtctttatctctgcactgatcggtattctccagcacattcgcgtgttgccggtgatcatccgcgcaattggtttcctgctctccaaagtcaacggcatgggcaaactggaatcctttaacgccgtcagctccctgattctgggtcagtctgaaaactttattgcctataaagatatcctcggcaaaatctcccgtaatcgtatgtacaccatggctgccacggcaatgtccaccgtgtcgatgtccatcgttggtgcatacatgaccatgctggaaccgaaatacgtcgttgctgcgctggtactgaacatgttcagcacctttatcgtgctgtcgctgatcaatccttaccgtgttgatgccagtgaagaaaacatccagatgtccaacctgcacgaaggtcagagcttcttcgaaatgctgggtgaatacattctggcaggtttcaaagttgccattatcgttgccgcgatgctgattggctttatcgccctgatcgccgcgctgaacgcactgtttgccaccgttactggctggtttggctacagcatctccttccagggcatcctgggctacatcttctatccgattgcatgggtgatgggtgttccttccagtgaagcactgcaagtgggcagtatcatggcgaccaaactggtttccaacgagttcgttgcgatgatggatctgcagaaaattgcttccacgctctctccgcgtgctgaaggcatcatctctgtgttcctggtttccttcgctaacttctcttcaatcgggattatcgcaggtgcagttaaaggcctgaatgaagagcaaggtaacgtggtttctcgcttcggtctgaagctggtttacggctctaccctggtgagtgtgctgtctgcgtcaatcgcagcactggtgctgtaagaccatacataaaaaagccggggataattccccggtttttttacgcctgttaatcagctaatggctgcgggcgaccaatcaaatacccttgcagatattgcaccccgagcttatgcaatagcgcctgctgctgttgcgtctcgacaaactccgcgaccacactcaatgacttcgctttcgccagatcggtaattgatctcacaatcatcgcatccagcgtgttcgtgacaatatctttcacaaagacgccatcaattttgatgatatcagcctgcaaacgctttaaccgttcgtagttggcatatccggtgccaaagtcatcaatcgcaatccggaaaccaaacttatgcagctgctcgatgttgtacatgctgctttctgcgttagaaaacgcctgctcctcggtgatctcaagaatgaccgcctgcggggagatgtgataacgcttaaacagacgaataatccgcccggcaatattcttttgcagcagcgtgagcggcattaaattgactgaaaagcgcggtccttttttgtcgcaagggtgtgttgccagccacttcaacaaggattccagcacttgcaaatcaaaacgcgcgctaaggttaaactgagcaataaggggcagaaacttatccggggtcataatgccgccgtcatatttcagtcgcgcgaggatctcatcataaccttcaccctctttgttgcgaattggctgggcgtagagcagcaaatcaccctgatctaacgccgtgcgaatggtattcagcaatagcacctgtttagtggtctgcccggaaaccatctcctctctgctatccagcgccagcacatgatgatgtgcgcaggattgctccgccagccagcttaactgccccaacaagggttgcagggtttcctgatttccatcaaaacgcccccaggcagcaccatagcccatatccagcccggtattgttccagtgaatttgccgactattcaggatgttaaccatatgctggagtcgcccttccgtttccggcccgctcagcactaacagcagttcactacccggcaattgatacaacttttcgttttcctgcatcaacggcagcagcgtacggcaaattgagcggatacagtgaacgcgcatcattaagccgtaatgacgactcataaactcaagattatcaatgcgcaggcagcaaaaactcttgcccgcctcttgctccggcgcttgttccaacgcacgaaagttgggtaggagcgttaacggatctgtcagcgcctgcaaatgccagcggcgattaagccattcactgcgatgataaatgcgcaccatatagagcaggcaaacgctaaaggaaatcagcaccgcaagaataaatgccagcgaatattcggtttccaccccttgcaaaaagttctggttgtaattcagaaggcaaagcgttgaaacagcccaggtgagatttaaaaacggatagcgaagcttaccgaccccgagggtaaagatgatgaagaaaacgggtaccaggtaaccggcaataaagtcgttttcataaggtgtgcacaacagaagtagcagcacgcttaacgctgccagccagcttaaggtaaatgcgcgtttctctttgcccaacgacggagcgatatccctgcgccacaatatctgcgcaaagtggggacttacaatcatgcgagtgagatagtagaaaagcatgttgtaaatcagcacagcggtgaaaaggcttagcaaatcaacgaccgtgaaaatggcatccgcatcgccgaaaaaggtggatatctttagcgggaaatcaaagaagctccccacaagatacatgctgcatttgatgccgatcggcgtcaccaaaccaagccagaacagacgttgccagacatatcggctggtcaatccataacgccaacgcgtccccagctgccagcgtaatattgcgcaggcacacaacacgacaaacgtctggctaccgagcatgaccgcagtctgtaaaaaagagagatgaaagttccacagattggtgcaaaacatcccgcataaaacgggaacgacaccgcgccagccaaagataaacaagattgacagcattacgcacagtggcatccacgccagaaagatataactggaatggataatggcaagtggcgaaataaaacgggatagctgaataagtaccacggtgagcgtaaacgctagtgtgaatatcttgatattttttatcaggttatgctccacaaacatgagtacactactctcactgatcggggttttcaggcacacaaataataagtttattcgcatcgcgaagcaaacagggggccagcctgttgccgatttttcatccaatgatgctttcaccaggcggcactaacccggacgtagactgtattacaaaagcggcaaaaagcagagacaaaaaacccccgctttgcagcgagggttggaaatttggtggagctaagcgggatcgaaccgctgacctcttgcatgccatgcaagcgctctcccagctgagctatagccccgtcacgtaaagcttgtcgagttgacgggcggcatcatatgaattccgcccgaatgtgtcaacggcaaattgcaacgtgtagtttcaatcgctgaaaaatcaggcaaatgaacaattttggaaaaccgctcgcattcagtagttattcatgtcacggtttcctgtaaagtggtgttataaaatgaactactaatagacccacatacattcagggaattgttatgttcaaggagaggatgacaccagatgaacttgccagactgaccggctatagccgccagaccattaataaatgggtacgcaaggaaggctggacaacgtcaccaaaacctggcgtccagggtggcaaagcccgactggttcacgtcaatgaacaggttcgtgaatatattcgcaatgctgaacgtccagaaggtcagggagaagcgcctgccctttctggtgatgcgccgcttgaagtattgctggtgacactggcgaaagagatgacgccagttgaacaaaaacagtttacatccttgcttctgcgggaagggattatcggattgttacaacgcttagggattcgcgatagcaaataatatgaaaagattacgcaataaaatgaccaccgaagaactggctgaatgcctcggtgtggctaaacaaactgttaaccgttggatcagagaaaaaggctggaaaacggaaaaatttcccggcgtgaaaggcggtcgtgccagacttattctggtcgatacgcaagtttgcgagtttattcagaacacgccagccttccataacacaccaatgttgatggaagctgaagagagaattgctgaatacgctcctggagcacgcgccccggcgtatcgacaaatcatcaacgcgatagataatatgacagacattgagcaggaaaaagtcgcgcaatttttgtcacgtgaaggaattcgcaatttcctcgcccgtctcgatattgacgaatcagcataaataaaaaacggcaggatattatctcctgccgtttatctttttacacgctaattactgctgattttcgcgttcagcaataaaatccagcgctttgttgatacgctcgatactgcgggtcttaccaattgcgtgaacggtaacatccagtgctggagactgccccgcaccggttacggcgacacgcagcggcataccaactttacccatacccacttccagctcatccgccgtcgcctgaatagcgtgatgaacgttttcagcggtccagtcagtaatcgcggccagtttgtcacgaaccacttccagcggctgacgcgctaccggacgcagatgttttttcgcggcgtcggcatcgaactcagcaaaatcttcgtagaaataacggcagctctgtgccatctctttcagcgtcttgcagcgttcgcccagcagtttcaccagatcagccagctgcgggccgttacgggtatcgatattttcctgctcaatgtgccactgtaagtgagtagcaacatactccggcggcagcgcgttaatgtagtgatggttcagccacagcagcttgtcggtgttgaacgcactggcagatttgctgacggcattcaaagtgaagtatttgatcatctcttcacgagtgaagatttcctgatcgccgtgggaccagcccagacgcaccagatagttcagcagtgcttctggcaaataaccgtcatcacgatactgcattacgctgactgccccgtgacgtttggacagttttttaccgtcatcgccattgatcatagaaacgtgcgcgtaaaccggcaccggcgctttcagggccttaagaatgttgatctggcgtggcgtgttgttgatatggtcttcgccacggataacgtgggtgatttccatatcccagtcatcgacaaccacacagaagttataggttggggaaccatcggtacggcggataataagatcgtccagttcctggttgctgaactcgatcggaccacggatctgatcgtcaaaaacaacagaaccttcctgcgggttagcaaaacgtacaacacacggttcatcatcagcatgatgctcatggctgtggcggcagcgaccgtcataacgcggcttctcacctttcgccatttgctcttcgcgcagcgcttccaggcgctctttagagcaatagcatttataagcagtgccctcttccagcatctgatcgatcaccgcgttgtagcgatcaaaacgtttggtctggtagtacggaccttcatcccactccaggctcagccagttcatgccatccataatggcttcgatagcttccggcgtggaacgctcaagatcggtgtcttcaatacgcagcacgaactcaccgccgtggttacgtgcaaaaagccaggagtaaagagcagtacgcgcgccgccaacgtgcagatagcctgttgggcttggcgcgaagcgagttttgattttcatgaaatggccttacgtttagaaagatgccgacaaccggcaaatcctggaaaaattaagtgggcgatattctatcactcccgcctgattcctcaatgtagttcgggtttctaccttacgcattattgttttcgttgacaaattgcgcaacacggtctgttttgcgatcatcttgcttaaatttacgacgaacgaacaatttctttagaaaatgcgttgactcattttgaactctccctataatgcgactccacacagcgggggtgattagctcagctgggagagcacctcccttacaaggagggggtcggcggttcgatcccgtcatcacccaccaactactttatgtagtctccgccgtgtagcaagaaattgagaagtgggtgattagctcagctgggagagcacctcccttacaaggagggggtcggcggttcgatcccgtcatcacccaccacttcgggtcgttagctcagttggtagagcagttgacttttaatcaattggtcgcaggttcgaatcctgcacgacccaccaatgtaaaaaagcgccctaaaggcgcttttttactatctgcgatactcaaagattcgaacctgcagcaggtttgagttgagcgcagcgaaacaacggagccgctcgcggcgacggcccgaagggcgagcgaagcgagtcatcctgcacgacccaccaatgtaaaaaagcgccctaaaggcgcttttttgctatctgcgatttgcgaaattgcctgatgcgcttcacttagcagactactatttccggcaattcctgtctcctcacctactgtgtcaatgcagccaacagcttaaccatcgcgggcgtcacctgctgtgtttcataaacaatatataaatctgcagggatgcgctgtttgagcggacggaaaatgacacctggccagttcatttgtgcgtagctgtccgctatcaatgtgataccaatgcccatactgaccatagcgagtaccgtttgcggttcattaacttcgcgaataacaaccggtgaaaatcccacctgctggcaaactcgctgcaaaaaatcccagtcagtgtaaacgggcggcattgtaacaaaatactcgtcacgtagcgcttccagcgggacggtggaaaatgatgagagatgatgctcttcaggcatcgccaccagaaacgccgattcatgcaaccgtaagctggtaaaaccagtcggtggttctgtcgccattcgccagatcccggcatcaagttcgcggcgttccagcaaggccatttgcatcgcgggcatcttttcgcgaaaaagaacgtcaacgttaggattttccctgaggaatcgccgcataaccgggcgcatccgtccccacattgccgttcccactacgccgagttcaatccgccctgcttctccccgacctatttgttcaatccgagccaatacattattagcattcaccagcaatcgacgcgattcttccatcaagattttgcccgcgtgtgtcagtacgacgctgcgcgaatggcgaataaaaagctgcgtgccgagttgattttccagctctttaatatgaatgctgagcggaggctgagacatatttaaacgcgctgctgcgcggccaaaatgcaactcttccgctacggcaagaaaataacggagcaacttaagatctgttctgtatacgcgttccataattaagtgctccatataataaatacatcgtattaaattatcatggcataaagtatttcaccaccagatatccgacatacataaacacaatggataatatacccggtaatacatttggtacaggaataggcaagcgcacgattgtaaacaaagcaccaataccaaaaccaacgccggaagaaaataaaatatctttcactaattaacctttatcataaaagcagctctgaagagcagagccgcgaatccttttaatgagtcaccgctcgatgctttatcttttcagggtcatgattatatttaaacccaaagaaaaatatcactgcgagaaaaagagcatatcctgcaaacaccagccagatagtttgccagtcttttacgccatccaccgaaaagtaatctactgccatgccactcagaatcgagccaacccatgcgccgacaccatttaccatggtcataaagagcccctgcgcgctggcacgaatgctggaatcaacttcctgttcgacaaataccgaaccagaaatattgaagaaatcgaatgcacagccataaacaatcatcgacagcagcagcaaaataaatccggttgttgacggatcgccataggcgaagaagccaaagcgcagcgtccaggccaccatactcatcagcatgacggttttaatgccaaatcgctttaaaaagaatgggatagtcagtataaagcccacttctgccatctgtgaaactgacagtaaaatggagggatatttcaccacaaaactgtcagcaaactccgggttacgggcgaaatcatgtaggaacggattaccaaaaacgttggtaatttgcagtaccgcacccagcatcatggcaaagaggaaaaagatggccatgcgtggatttttaaacagcacgaaggcatccagacccagcttgctggcaagcgatgtggtcgcttttttctccgcaaccggaatcttcggcaaagtcagcgcataagccgacagcagcaatgacgcaccggacgcgatatacagctgcagactactcaattccagatgcagcaggcttactgcccacatcgcgacaatgaaccccaccgtaccaaaaacgcgaatgggcgggaaagcggtcaccgggtcaagccctgcctgggcaagacaggaataagagacgctgttcgataacgcaatagtcggcataaacgccatcgcattgactaacatcacccaaaacatcatatccggatcagttacggatgccgcataaaaaagtacgcccgcacacaccaggtgacacagcatgtatgcacgttctgcgcgcagccatttgtctgcgatgatccccattataccaggcataataatcgcggcgatccctttggaactgtaaaccatgccaacattagcgccggtgaaatgaagagtattaatcatgtaagagccgagggtaaccagccagctcccccagataaaatattgcaaaaaggacattacctttaagcgcatcgcgatgctcataatcgtttccttgtcgcatcatttggcctcacccgcgaggccgtttcttattgtttttctcaggcaattttgcgcagaaagccacaaataaggttgatgaagttctgcttagagagctccgcagccgccagcgtttgcgcatgtgacaatttcacatcgcttaaaccttccgccatattggtaatcgcagagaccgcaacgactttaaggtcgcaatggcgagctgaaataacctcaggcaccacagacataccaacaacatccccaccaataatttgcatcatgcgaatttccgccgcagtctcgaaattcggccccggatacgagacgaacacgccctccgtcagagggaaaccctcttctttcgccactttttgtaacagtgcgcggtattccgcatcgtaggcatttgccagtgagaagaagcgctctccaaaacgatcatcgttaagacccaccatcggcgtaccgggcatggtgttgatatgatctttcaatgcgaccaggctgcctgcccccacttccggacgcagcgagcctgccgcattggtgcagaacagtagctcgcagcccagcagcttaaaggtacgaattgcgtcagtcataatggtcattccacgaccttcgtagaaatgtccgcgacctttcatacataccaccggtacgccctggagatggcccagcactaactcccccgcatgaccatgtaccgtacttaccgggaagcccggcagcttttcgtaggaaattgcgacagcgttctcaatctgatcggccagcgcgccgagcccggaacctaaaataaaggccactcgtggcgtgaaatcaggtttataagtcttgataatatctatgcaaaacagcgggttatgagaaaattgaacctgagacatacatatcctttttctgtagggtggaatctaacgcctttttatagcgaggttgtcccggctcttaccaatacacttttctcacgcattcaatagcgattcgatatcgatggatttatatcttttctctattaatccacggtaaaaactgtattggcgatattaattcctttgcattaacaatatgtcgtttttagcaaaccactttattaagcaatctactaataacgatcggcatagggaattatgctatgaaaaaacatcttttaactctgacactttcctctatattagcgatacctgttgtatctcatgcagaatttaaaggcggttttgcagatatcggcgtgcattatctggactggaccagccggactaccgaaaaatcgtcgaccaaatcacacaaagatgattttggttatcttgaatttgaaggtggcgctaactttagttggggagaaatgtacgggttcttcgactgggaaaacttctataacggtcgccataataaaccaggtagcgagcagcgttatacctttaaaaataccaaccgtatttacctgggtgacaccggatttaatctctacttgcatgcgtatggcacctacggttctgcgaatcgcgtgaatttccacgacgatatgttcctgtacggtatcggctacaatttcaccggcagcggttggtggttcaaaccgttctttgctaagcgttatacagatcaaacctattacactggcgacaacggctatgtcgccggctgggttgcaggttacaactttatgctgggcagcgagaaattcactcttaccaactggaacgagtacgagtttgaccgtgacgctacctatgcagcgggtaatggcggtaaagaagggctgaatggcgcagttgcactgtggtggaatgcaacatcacacattactacggggattcagtatcgatatgcggatgacaaactgggcgaagatttttaccaggatgcgataatctactccatcaaatttaacttctgattgattactgccggggctcccggcagtatgaattcactctatatctgatacaacggatccccttcccgcccagccattagcgcattgccctggtctcgtaccacgtcccataaagcttcagcggcggtggaaagtgaacggttcttcctgcgcaccagcatcaactggcgttcaacaaccggcgtaatgcgctttaccaccagtgggctaccttcaggcaatggtagcgccagtgcgggaagaatactgatgccgatgcctgcggctaccatcgggaacagcgtcgccggatgtccaatctcctgcacaatattcgcctgaataccattgcgcgccagcgctgcgtcaatcagcggtcggctgcctgacgcgtaatcctgcaacaccaatttcgctccctgtaatgcctgccagggtacataatcttccacggccaaagcgctatcgcgatggcaaagcagaaagaaaggctcggaaagaatcgcttcacattgcagatcgcccactgggcctggatcgatgacgatgccaaaatcgacatctccctggcgaatactttccattacccactgctgcggacgatcgtgcaggacaaactgaatatctggatagcggcgatggctttcagcaatgcattgcggaataagatgcgcggaaatggtctggctggcagcgacccgaacttttccgctcagttgttgccccatacgcccggtatcgcgcaacgtgctgttcagttcatccagcagtcgctcaagacgcaaagccagctgctgccctgcatctgtaagcaccacttcacgcgtggttctgtccagcaggcgaacaccagtatgattttccagttccttcacactgtgactcactgccgactggctcaggccgatacgctctcctgcacgactaaaacttttctcctgcgctactgtgacgaaaacctttaattgttttaaagaataattcatctgttttcttcatgaatggatgcaataaatcaattttatttctcaaactggaagaagcacaatagaaccatcgatcatctggagtctttatgaaactttttcgtatcctcgatcctttcaccttaaccctgatcacggtggtgttgctggcctctttctttccggccagaggcgatttcgtccccttctttgaaaatctgaccaccgcaactattgccctgctgttctttatgcacggcgcgaagttgtcgcgtgaggcgattattgctggcggtggtcactggcgactgcatttgtgggtaatgtgcagcaccttcgtgctgtttccgattctgggtgtactgtttgcctggtggaaaccggtaaatgtcgacccgatgctctactccggttttctctacttgtgcattctcccggctaccgtgcagtctgcaatcgccttcacgtcaatggcgggcggtaacgtcgcggcagcggtttgttctgcgtcggcatccagcctgctggggattttcctttcaccattgctggttggtctggtgatgaatgttcacggtgcagggggcagccttgagcaggtcggtaaaattatgctgcaactgctgctgccgtttgtgttggggcatctttcccggccgtggattggtgactgggtgtcgcgcaataaaaaatggattgcgaaaactgaccagacgtccattctgttggtggtttatacagcgttcagcgaagccgtcgttaatggtatctggcataaagttggctggggatcattgctgtttatcgtggtggtcagctgcgttcttctggctatcgtgattgtagttaacgtctttatggcacgccgactgagcttcaataaggcagatgaaattactatcgtcttttgtggttcgaaaaagagtctggcaaatggcatcccgatggcaaacattctgttccccacatcggtgatcggtatgatggtgctgcccctgatgattttccatcagatccaattgatggtctgtgcggtgctggcgcgtcgatacaaacgccagaccgaacagttacaggcgcagcaggaaagcagcgccgataaagcttaaagcggacgcttcaggggctggaccagttgcgtcagcccctcggttttaatcagcagcgtgatttgcattagctcaccgagcttccctgccgggaactcatctttgcgggcaaaccacagcagatactcctccggcaggtcgattaagcgacgccctttgtatttgccaaacggcattatcgtattggctatttcaatcagctgctctttttccatctcagctacccagcaaacgcagcatttccgcttcgtcgatgacttcaatgcccagttcctgcgccttcgccagtttagatcctgcagcttcacccgctatcaccagatcggttttcttcgacacgctgcccgcgactttcgcgcccagttcgaccagtcgagctttagcgtcatcacgcgacatctggcttaagctgcccgtaagcaccacggttttaccagcaaacgggctgtcaatctcttccgcgttgataacgatcggcgcaggccagtgaacaccttccgccaacagctcgctgatgacattgcggttgctttcttcggcaaagaagttgtgaacgtgggatgcaacgacaatgccaacatcaggcaccttttgcagctcttcaatcgaagcggcttccagcgcttccagcgtgccgaaatatgccgccagacctgctgcggtggcctcgccgacttcacggatgccaagtgcatagaggaagcgagcaaaggtggtttctttcgctttttccagcgcgttaaccacgttttgtgccgattttggccccatacgctccagtccggtcagtttgcctgcggtgagtttgaacagatctgccggagtatggacatattctttttcaaccagctgatcgatgattttgtcgcccattccgtcaacatccatcgcacggcgggaaacaaagtgtttcagcgactctttacgctgcgcaccgcaaatcaggccaccggtacagcgggcaaccgcttcaccttccacacgctcaacgtcagaaccacataccggacaatgcgtcgggaatacaacctcacgggtatcttccgggcgttcagaaagcacgacgttaaccacctgcgggatcacgtcgccagcgcggcgaatcaccactttatcgccaatgcgtaaaccaagacgttcgatttcatccgcattgtgtaaggttgcgttactcaccagcacgcctgcaacatggacaggttccagacgcgcaacaggcgtaatcgcgccagtacgcccaacctgaaactcgacgtcacgcacaaaggtcatctgctcctgcgccgggaatttaaacgctaccgcccagcgcggggcacgcgcgacaaagccaagctgctcctgctgtgccagtgagttgaccttaatcaccacgccgtcgatatcaaagcccagcgtcgggcggtcttcttccactttgtgatagaacgccagcacttcttccgccgattcacaaagcgttacccgatcgctgaccggcaacccccactttttaaattgcagtaaacggccaagatgagtatccggcagctcgccaccttccagaacaccaacgccatagcagaaaaaagtgagcggtcgcttcgctgtaatacgcggatcaagctgacgcagtgaaccagctgccgcattacgtgggttagcaaacactttcccgcccgtgcgtcgcgcatcttcgttaatcttttcgaaccccgcctgcggcaggaacacttcaccacgcacttccagacgcgccgggatattctctccgtgcagcttcagcggaatggcgcgaatagtacgcacattagacgtgatatcttccccggtggtgccatcgccacgggtcgcggcactgactaaaacgccattttcatacagaatactgacggcaagaccatccagcttcagctcacagcaccaggtgactttctcgttgtttttcagacggtcctgcacacgtttgttgaaagcaagaaagctttcttcatcaaaaacgttatccagtgacagcattggtacttcatggcgtatctggctgaaagccgccagcggcgcagcgcctacacgttgagtaggcgaatcaggcgtaatcagttctggatgtttggtttccagctcgcgcagttcgcgcatcagcctgtcgtattcagcgtcgggaatttccggcgcatccatcacatgataaagatattcatgatggcgaagcgtcgttcgcagttctgtcagttgttgttcgattgattccatatcgcaccatcaatgctaaaaacccccgacaagcgggggttcgaagaggagttaatttgccttaagtgtatcaggcgttggcgtctttgacttcgcggatgatgtcctggtactcgcgcaatttctgcggagtcatcatacggcgctgatcgtcaagcacgacaccgcccacttcatcggcaatatgctgcgcagattgcagcatcagcttgaagttctgcagctcgtcaccgtaagacggtacctgcataaagatagtgacacccggagtagtgaaatccttcatttcaggatcaaaggttcccggtttcaccatattcgccaggctgaataacgccgggccgctgccatccgggctaagatgacgatggtaaatattcatatcgccaaaaatgaagcccgcttgttgaatgctgttaagaagcagttcaccgtttagctcgctaccgtgatgcgccgcgacgttcatgataatcaccgcttctttgcgcttcggtttatccataactggagcaggttccgctacaggctcaggctgtggtgccgctacgggttctgcaggctggaaagcctgttgtgccggttgcggtgctgaatgcacaggctgcggcgctggcgcgacctgtggcgaaactggctgctgcaacggctgttcaggctgcggctgataggcaggctgctgcaccggctgcgctggatgcggagcatgttgcggcggtacctgcgcttcaggcggctgctggaccggttgacgcggctgcgcagacgcataaggcggttggtactggtgttgcggcgacggacgagcagcctcatgctcctgagcgttagccggggcatgattcacgcggtgaacacgaacctcaccaacgccctcatcatcttcgacatcctcgtcataagaatcgtcgtcacgttttgacttcattcgttttaatggccgatcgcggaacatagaagatcgttctttacggctggtccagaaaccatgtaccagtaaagcgattatggcgatcgcgccaacaatgattaatatcagacgcaaatcctgcatcattatattctctgttgttctaacaccttgccaccacggcaaacatttactcactaagagtatttgccgattacctcaagtgcaagtgcactattaactttcacagcacaaagatagatgaaatcgtgctttttgctgttttttcgaacatatcctaactgtccattgcgcaattacccggtaaaatacgcagaattttcctgggattggtcaaaaggagctcatcctgattatggtttcatcattcacatctgccccacgcagcggtttttactattttgcgcaaggctggaagctcgtctcgcaacctgggattcggcgtttcgttattttaccgctgctggtcaatattttgttgatggggggcgcattctggtggctctttacacagctcgatgtctggatcccgactctcatgagttacgttccggactggctacaatggctgagttatctgttgtggcctctggctgtcatctctgtgctgttagtgtttggctatttcttctccacgattgctaactggattgccgctccgtttaacggtttattggctgaacaactggaagcacgattgactggcgctacaccgccagataccgggattttcggtatcatgaaagatgtgccgcgaatcatgaaacgcgaatggcaaaaatttgcctggtatctgccgcgcgcaattgtattactaattctttacttcatccctggtattgggcaaaccgtcgcgccggtactgtggttcctgtttagcgcctggatgttagccatccagtattgcgattaccccttcgataaccacaaagtgccgtttaaagagatgcgcaccgccctgcgcacacgcaaaatcaccaatatgcagtttggtgctttaaccagcctgtttacgatgatcccgctgcttaatctgttcatcatgcccgttgccgtttgtggcgcgacggcgatgtgggtcgattgctatcgcgataaacacgcgatgtggcggtaacaatctaccggttattttgtaaaccgtttgtgtgaaacaggggtggcttatgccgccccttattccatcttgcatgtcattatttcccttctgtatatagatatgctaaatccttacttccgcatattctctgagcgggtatgctacctgttgtatcccaatttcatacagttaaggacaggccatgagtaagatttttgaagataactcgctgactatcggtcacacgccgctggttcgcctgaatcgcatcggtaacggacgcattctggcgaaggtggaatctcgtaaccccagcttcagcgttaagtgccgtatcggtgccaacatgatttgggatgccgaaaagcgcggcgtgctgaaaccaggcgttgaactggttgaaccgaccagcggtaataccgggattgcactggcctatgtagctgccgctcgcggttacaaactcaccctgaccatgccagaaaccatgagtattgaacgccgcaagctgctgaaagcgttaggtgcaaacctggtgctgacggaaggtgctaaaggcatgaaaggcgcaatccaaaaagcagaagaaattgtcgccagcaatccagagaaatacctgctgctgcaacaattcagcaatccggcaaaccctgaaattcacgaaaagaccaccggtccggagatatgggaagataccgacggtcaggttgatgtatttattgctggcgttgggactggcggtacgctgactggcgtcagccgctacattaaaggcaccaaaggcaagaccgatcttatctctgtcgccgttgagccaaccgattctccagttatcgcccaggcgctggcaggtgaagagattaaacctggcccgcataaaattcagggtattggcgctggttttatcccggctaacctcgatctcaagctggtcgataaagtcattggcatcaccaatgaagaagcgatttctaccgcgcgtcgtctgatggaagaagaaggtattcttgcaggtatctcttctggagcagctgttgccgcggcgttgaaactacaagaagatgaaagctttaccaacaagaatattgtggttattctaccatcatcgggtgagcgttatttaagcaccgcattgtttgccgatctcttcactgagaaagaattgcaacagtaatgccagcttgttaaaaatgcgtaaaaaagcacctttttaggtgcttttttgtggcctgcttcaaactttcgcccctcctggcattgattcagcctgtcggaactggtatttaaccagactaattattttgatgcgcgaaattaatcgttacaggaaaagccaaagctgaatcgattttatgatttggttcaattcttcctttagcggcataatgtttaatgacgtacgaaacgtcagcggtcaacacccgccagcaatggactgtattgcgctcttcgtgcgtcgcgtctgttaaaaactggcgctaacaatacaggctaaagtcgaaccgctaggctagactttagttccacaacactaaacctataagttggggaaatacaatgttccagcaagaagttaccattaccgctccgaacggtctgcacacccgccctgctgcccagtttgtaaaagaagctaagggcttcacttctgaaattactgtgacttccaacggcaaaagcgccagcgcgaaaagcctgtttaaactgcagactctgggcctgactcaaggtaccgttgtgactatctccgcagaaggcgaagacgagcagaaagcggttgaacatctggttaaactgatggcggaactcgagtaatttcccgggttcttttaaaaatcagtcacaagtaaggtagggttatgatttcaggcattttagcatccccgggtatcgctttcggtaaagctctgcttctgaaagaagacgaaattgtcattgaccggaaaaaaatttctgccgaccaggttgatcaggaagttgaacgttttctgagcggtcgtgccaaggcatcagcccagctggaaacgatcaaaacgaaagctggtgaaacgttcggtgaagaaaaagaagccatctttgaagggcatattatgctgctcgaagatgaggagctggagcaggaaatcatagccctgattaaagataagcacatgacagctgacgcagctgctcatgaagttatcgaaggtcaggcttctgccctggaagagctggatgatgaatacctgaaagaacgtgcggctgacgtacgtgatatcggtaagcgcctgctgcgcaacatcctgggcctgaagattatcgacctgagcgccattcaggatgaagtcattctggttgccgctgacctgacgccgtccgaaaccgcacagctgaacctgaagaaggtgctgggtttcatcaccgacgcgggtggccgtacttcccacacctctatcatggcgcgttctctggaactacctgctatcgtgggtaccggtagcgtcacctctcaggtgaaaaatgacgactatctgattctggatgccgtaaataatcaggtttacgtcaatccaaccaacgaagttattgataaaatgcgcgctgttcaggagcaagtggcttctgaaaaagcagagcttgctaaactgaaagatctgccagctattacgctggacggtcaccaggtagaagtatgcgctaacattggtacggttcgtgacgttgaaggtgcagagcgtaacggcgctgaaggcgttggtctgtatcgtactgagttcctgttcatggaccgcgacgcactgcccactgaagaagaacagtttgctgcttacaaagcagtggctgaagcgtgtggctcgcaagcggttatcgttcgtaccatggacatcggcggcgacaaagagctgccatacatgaacttcccgaaagaagagaacccgttcctcggctggcgcgctatccgtatcgcgatggatcgtagagagatcctgcgcgatcagctccgcgctatcctgcgtgcctcggctttcggtaaattgcgcattatgttcccgatgatcatctctgttgaagaagtgcgtgcactgcgcaaagagatcgaaatctacaaacaggaactgcgcgacgaaggtaaagcgtttgacgagtcaattgaaatcggcgtaatggtggaaacaccggctgccgcaacaattgcacgtcatttagccaaagaagttgatttctttagtatcggcaccaatgatttaacgcagtacactctggcagttgaccgtggtaatgatatgatttcacacctttaccagccaatgtcaccgtccgtgctgaacttgatcaagcaagttattgatgcttctcatgctgaaggcaaatggactggcatgtgtggtgagcttgctggcgatgaacgtgctacacttctgttgctggggatgggtctggacgaattctctatgagcgccatttctatcccgcgcattaagaagattatccgtaacacgaacttcgaagatgcgaaggtgttagcagagcaggctcttgctcaaccgacaacggacgagttaatgacgctggttaacaagttcattgaagaaaaaacaatctgctaatccacgagatgcggcccaatttactgcttaggagaagatcatgggtttgttcgataaactgaaatctctggtttccgacgacaagaaggataccggaactattgagatcattgctccgctctctggcgagatcgtcaatatcgaagacgtgccggatgtcgtttttgcggaaaaaatcgttggtgatggtattgctatcaaaccaacgggtaacaaaatggtcgcgccagtagacggcaccattggtaaaatctttgaaaccaaccacgcattctctatcgaatctgatagcggcgttgaactgttcgtccacttcggtatcgacaccgttgaactgaaaggcgaaggcttcaagcgtattgctgaagaaggtcagcgcgtgaaagttggcgatactgtcattgaatttgatctgccgctgctggaagagaaagccaagtctaccctgactccggttgttatctccaacatggacgaaatcaaagaactgatcaaactgtccggtagcgtaaccgtgggtgaaaccccggttatccgcatcaagaagtaattcttgccgcagtgaaaaatggcgcccatcggcgccatttttttatgcttccgccagcggcggcaaaatcaattcatcgctctcatgctgctgggtgtagcgcatcacttccagtacgcgcaaccccgctcggtgcactgcatcggttaacgccttccctttcagcaagccactgatgagctgagcacaaaacaggtcgccagtccctttcaggtcggtttttacccgtgaatgggaaatgacattcacgctgtcggcagtgaccaccacaacctgcatctcctgattttcttcattaccggaggcgctggtaaccaccacccattttaatgtgtctgaaagcagactttttgcggcagcaatggcactgtcgagatcgcggcaatttttaccggtcaggatttccaactcaaagatattgggggtaattccctgcgccagcggcagtaaatattgtcgatacgcttcgggaaggtcaggtttgacataaattccgctatcaatatcgccaatcaccggatcgaccatgatcaataggtcaggatggtctttgcgtagcgcagtcagccactcggcaaggattttgatttgcgatgccgttcccatatagcccgtggttacagcacgaagttggcgcagcgcatcacgctcctgaagcgcacgcaaatagccgctaaaccattcgtccggaatcgcaccaccgtagaaagtgtcataatgcggcgtattgctcagcaataccgtcggcacggcaaagacattcaggccgttctgtttgatagcaggcacggcaatgctgttgcccacgctgccgtaaaccacctgcgactgcacggcgacgatatccgcctgcagtgccctactcttatcgttaaacaacaacaaactactcatttaattttttctccttgccgatgatcctcatcgtaatccaaccgaaactttacctgattctggcagtcaaatcggctatcacaaaacaaggataaggtaattcaatgaagaaaatcatttgtctggtcattacactactaatgacactccccgtttacgcgaagttaactgcccatgaagaagcccgcatcaacgccatgctggagggattagcacagaaaaaggatttgatatttgtgcgcaacggtgatgaacatacctgctatgaagcggtttctcatctgcgtctgaagctcggcaatacccgtaaccgcattgacactgccgagcagtttattgataaggttgcttcgtcgtcatcgattactgggaagccgtatattgtgaagatccccggtaagagcgatgagaacgcacagccttttttacatgcgttaattgcgcagacggataaaacggtgcctgcggaaggaaattaatccgctttgggaaggcatttacaggaggtaacatgaaaaaacgctttatttatcacgatgaaaaatcgaataaattttggtggatagattacgaaggggatagtttagctgtcaactatggcaaggtaggtagtattggtaaattccagacaaaagagttcgataatgaagaacagtgtctgaaagaagccagtaaattgattgccgcaaaaatgaagaaaggctatcaagaagatccaaagtttaacttcatggatcgctactattttgatgatgaagaaattgggttacatgttaaaacgtcacacccaaacttccagtgccattttactgatccactttatatgtgttgctgggatgaagaatctccttttggcagcgatgaaggtgctgatgctctaaacgttcttgaaaatagcctccgtaaagagccggatctggactgtgctgatttccatcaaatgttaattgaaactatgtggggtatgaaatacatcgctatggacagtattcttgaagaggatgttcgtgcgcaattactagtcgatgaaatgagcactatccagagcaatatgattacctacgcaactgcattcggtcagattaaagtcatgggtaaaatctcccataaacttaaaaagatgggactcaatgcactagcgcgtcatcagcttaccgcaaaaattcttcaatggggtgacggtcaggactcaccaatacttcaaaaaatgattgatgactgaaccgccccgggtttcctggagagtgttttatctgtgaactcaggctgccagatcatcgtttccgatggaagcataataagctttttctgcttctgccggaggagtatggcccagccttcccagcaatcgtcgattgttataccagtccacccacgttagtgtggccagttccacttctgcacggtttttccagctcttacggtgtattacctccgctttgtaaagaccattgatgctctcagccatcgcgttgtcatacgagtcgcctgtactccctgttgatgccagtaatccggcttcttttagtcgctccgtataggccagtgacacatactgagagcctttatcgctgtgatggatggtgccagacggacgacgggcccacaacgcctgctccagcgcatccagcacgaatgtcgtttccatagacgatgagacccgccaccccacgatgtatccggcaaacacatcaatgataaacgccacatagacgaagccctgccatgtgctgacgtaagtaaaatcagccacccacagctggtcaggtcgttctgccacgaactgacggtttacgcggtcacctgtggcaacggttttccggctgacggtagtgcggacctttttaccccggagaacaccggcaagtcccataaccgccatgaggcgcgccactgtacatctggccaccctgattccttcccgtaacaactgacgccagactttacgcacaccgtacacctgatgattttcatcgtatacgcgctgtatctctctcttcagccagtcgtcgtgctgcgcacgggcactgcgtttatccggatgatgtcgctgttgctgacaatggtaatacgttgacggggcaatatgcagttcgctacataccggtccgaccccgtactgctcacgcagcttatccagcagtggcatcattttttccagaggcggtcgaactccgccttcgcaaaataagcggaagcctggcgaaggatatcgttactgcggcgcagttcacgattttcacgttccagctctttcagacgctgacgttcagcgctggtgagcccaccatcaccgcccccggtatcccgctcatgctggcgaacccagacacgcagagtctccggcgtacagccaatctttggggcaatggaacaaattgccgcccactgtgagtcatattcatcctgactttccagaaccatacgaatcgcccgctgacggacttcgggggaaaaacgagtatttttagtcatcctgtttacctctttctcagggagtttagtctccaggatttccggggcggttcagaccttacggcgtttcctcacgaaaattaaatactgcatttgtcggcagcaacaactgttaaaaaagtgcgctttgtttatgccggatgcggcgtaaacgccttatccggcctacaaaatcgtgctaattcaatatattgcagaaaccttgtaggcctgataagcgtagcgcatcaggcagttttgcgtttgtcatcagtctccgatgctattaatccttaaatccccgccccctggctaaaatgctcttccccaaacaccccggtagaaaggtagcgatcgccacgatcgcagatgatcgccaccaccaccgcgtcagggttagcttttgccacccgcagtgctccggcaaccgcgccgccggagctgacgccacagaatattccttcccgcaccgccagttcgcgcatggtgttttccgcatcgcgctgatgaatatccagcacctcatccaccagagaagcgttgaaaatccccggcagatattccgtaggccagcggcgaatgccgggaatgctgctgccctcttccggttgcaggccgacaatggtcaccggtttggattgttcgcgcataaagcgtgagacgccggtgatagtgccggtcgtccccatgctggagacaaaatgagtgatgcgcccgccggtttgctgccagatttccggcccagtggtggtgtaatgcgcataagggttatcgggattattgaactgatcgagcagctttccttcgccacgattcgccatctccagcgccagatcgcgcgcaccttccatgccctgctctttggtgacaagaatcagttccgcaccataagcacgcatcgccgcacggcgttcctggctcatgttgtcgggcatcagcaatttcatgcgatagcctttcagcgcggcaatcattgccagcgcaatgccggtgttaccactggtggcttcgattaagacatcacccggtttaatttccccgcgcttttccgcctcgacgatcatcgaaagtgccgcacgatctttcaccgaacctgccgggttattgccttccagttttaaccacacttcactgccgttatccggccccattcgctgcaacttcaccagaggcgtattgcctattgtttgttctaatgtactcacgatctctatccatacgtggtgttgcctgatgcgacgcttgcgcgtcttatcaggtctacaggttacaaaccttgccattaaaaagcccggatcgcgggaagcgcctccgggcgtttaacattcactcaacctatcaggcgctttgtgcgagagcaagttcctcatcgcgggtttcgatacgctcgtcgccgttatacagccgcgcatgttgcagaccaacgaataaacgctcgccacgctgcggggcatcgtcgccatgcatcacgaccgtcagcggttcgttgtaccaccccagcggctgcaccactaattgggtgtagtgacctttcgggctggcttccagtacctgtaccggcagcggcgaatcgaggctggtacggcggctgatatccacttcccaagggcgcaggaagagatccaccggcccctgatacgcaggtgtgtagcccagcggccagcgatgcgcgccaacatggaactgcccgccgcgaatggttccctgcaggcggttcacttcgcccataaattcgagcacaaaacgggtcgccggttcgcgccatacctgatccggcgcgtcagcctgttcaatattgccctggctcatcacaactacacgatcagctacttcggtcgcttcttcctgatcgtgggtcacaaaaacgctggtgaattttagttcttcatggagttgacgcagccagcgacgcagctctttacgcacctgcgcatccagcgcgccaaacggttcatcaagcagcagaatttgcggttccacagccagcgcgcgcgccagcgccacgcgctgtttctggccgccggaaagctgcgccggataacgatccgccagatgggcaagctggaccatttccagcaattttgtcactttcgctttgatggctgcggcattcgggcgctcgcgacgcggcagcaccgtcaggccaaaagcgatattgtcgaacaccgtcatatggcggaacagcgcgtaatgctggaacacgaaaccgactttacgatcacgtgcgtgcaggcggctcacgtcggtgccgtggaagcgaatatgcccgctggtttgatgctccagcccggcgataatgcgcagcagcgtggttttcccggaaccggacggccccagcaacgcgaccatctgacctgaaggaatatccagtgagatatcgttcagcacctgggtgcgaccaaacgacttcttaatattggcaatctcaatgctcatgatgttcctcctgctgtgcgcgtttttcctgattctccaggcgccactgcaacatactttttaaaaacagggtgataatcgccatcagcgttaacagcgccgcagcggtaaaggagccgacggtgttgtagtcctgctccagcaattcaatctgtaacggcagcgacagggtttcgccgcgaatcgagccggaaaccaccgacaccgcgccaaactcgccaattgcgcgggcgttggtcaacaccacgccataaagcagcgcccagcggatgttcggtaatgtgacgcgacggaacatctgccagccggacgcgccaagcaaaatcgccgcttcgtcttcctggctgccctggcttaacatcaccggcaccagttcgcgcaccacaaacggacacgtcacgaagatggtgaccagcaccattcccggccaggagaacataatttgcaggttatgctcgtcgagccaaccgccgagcgggccgttagagccgtagaacagcaaatacaccagaccggcaaccaccggcgatacggcaaacggaatgtccagtagcgtcagcagtaactggcgtccagggaagttaaagcgcgtcaccagccaggccagcagaatgccgaacaccaggtttaccggtacggcaatcagcgcgatcatcaccgtcagccagatggcgtgcagcatgtccggatcggccagattctgtaaaaccggcatcagccccttgctgaatgcctgcacgaagatgtaaatcatcggcaccagcaggatgaacgccgaaaccagcatcccgatgccaatcagaaaccatttgccccagttaatcgggcgcgcgtcataacgcttcaattgggtaacttccgccattaatgacctaccacacgccgaccaaagcgactttgcagagtgttaattgagaacagcagcagcagagatgccgcgaggatcaccgaagcaatcgcgctcgctgccgggtaatcaaactcctgtaagcgcacaaaaatcatcagcgacgtcacttccgtcttccacgcgatatttccggcgataaaaatcaccgcgccaaattcaccaagactacgggtaaacgacagcgccacgcccgccaccagcgccggagaaagctccggcagcaccactttgcagaaactctgccagcgcgttgcaccaagcgtttccgccgcttcttcatattccgggcctaactcttccagcaccggctgcacggtacgcaccacaaacggaatgctggtaaaggccatagccaccgcaatccccagccatgtataggtgactttgatatcaaacttcgccagccattcaccgtaaaaaccgtttacggaaaagagcgaggccagcgttaaaccggcgacagccgttggcagcgcaaagggtaaatccatcagcgcatcaagcagcgtgcggcctgggaagcgatagcgggttaggatccacgccatcagcagaccgaaaacgccgttaaaaatcgatgccacaaacgccgacagcagcgttactttgtaggccgcgaccacctgcgggttggtgatcacctcccagtactgcgcccagctcatctgggccagttgcatcaccagcgcggagagcggcagcagcaaaatcaggcacacaaacagcagactggtgccgaggcttaaggtaaagcccggcagcacgcgtctggaggagacagcaaacatcagttacgccccgccgctaacagcttgtctaactcgccgccgctggtgaagtgggttttcatcacttccggccaggagccaaatttgtcttccacgcggaacagctcggtctgcgggaatttgtctttcagtttgtccatcacctccgggttattcacgcggtagtaatagtcggtgatgatggtttgcgcctgcgggctatagagccagttcagataggctttggcggctttttccgtaccgttggcctgcacgtttttatcaacccacgccaccgggaattccgccagaatgttggttttcggaatcaccacttcaaagccctgcgcttcatactgtttacggatgttgttcacttccgattcgaagctaatcagcacatcgcccaggccgcgctcggcaaaagtggtggtcgcgccacgaccgccagtatcgaacacttcaacgtttttcaggaactgggtcataaactgttcggttttgcctttgtcaccaccgtcagctttatccgctgcgccccatgccgccagataggtataacgcgcgttacccgacgttttcgggttcgggaaaatcagcttcacgtcggagcgcaccaggtcgttccaatcgtggatattcttcgggttacccttacgcaccaggaagcccatggtggagtagaacggcgagctattattcggcaggcgcgactgccagtcggccgggatcagcttgcctttatcgtgcaggatttgtacgtcggtcacctggttataagtgacaacgtcggcttttaagccctgtaaaatcgccagcgcctgttttgatgacccggcatgagattgttttatcgtcagtttgtcgccgccgttatcttttgcccattgttgctcaaacggcggattcagggcggcaaacagctcgcgggagacgtcataagaactgttcagcagttccgttgcctgtacatggcccgccagcagcagagaagcgaccagcgcgagtgagttctttttcagtaagttaacggccattgcgcacccttataaatttaatgactttctaatagccatcatatttataacggacgtgaaaggagtaacggttttatataccgtttggtgatttggaagttgaaaagggaataagaacttggttcaacaggcgtaattgttgcagtcagtttggacacgaacagcgcggagaaaccggagcgtacacatagtacgtgaggatttcgagcactgcccggggccaaaatgacaaataaaatagcctggtgaacttagttcaagacgaaatcctccccacaaatgcagggaggaaacagaggtgaatcagataccgacgctaaccgtctccggcagtgtgctgccgccatcaatcacattctgtgtaccggttaaatagctggattcatccgatgcgaggaaggccgccagttcgccgacttccagcggatcggcgaggcgacgcatcgggattgctttcgccatttcagtcagcaccgactctggatcttccgggttcgactggcgggcaatgctttccgccattggtgtgcgcacgtatcccgggcaaatggcgttaacgcgaataccagactgcgcgtactccaccgccagcgattttgtcaggccaacaatcgccgctttcgttaaggcgtacgccgtttcgccaggatcggccaccatatcaccagtgactgaagacatcatcacaatgcgaccatctttgcgggcaatcatctccggcagcaccgccttcgtgacgttccatacgcctttaatattgatgtcaatatggaaatcgcgatcgtcatcgctcatatcgaggaaactgcccagacgacaaacgcctgcgttattcaccaggatatcaatgcgcccttctttttccttcgcgcgtttgatagctgcggctaccgacgccgggtcacgcacatcggcgacaaccgccgtacagcgatgaccacgaccacacagttcgtccgccagcttttcgatctcaggggagatatccagcaagattaggttcgcgccatgacgtgcaaaagttctggcaattccttcgccaattccctgcaatgcgcccgtaatcagtgctgtcttgcccgtgagtttacccattttaatgctctccttgttaatacagagcgttacactccattccctctgaaaatacaggataaacaaaatattgctgcggatcagctcactaattcaggaaaatctcaatccagtcgctgctttatgcatcatttcaggcgttgtgttagctcactgctgcgctgaatcattttcaatgactccacatcattgagttgcacaaggccaacaaacagtaaatcggtaacagaattttgcgccgtgcgggtagacatcgacgagctacgccattcggtttctccggaaacggtatcgagggtgaaatgcgccagccgccgcagcggagagtcagtcagagaagtaatggcaatcaccgttgccccctgctttcgtgccgcttctgcgcacaagacaatctcttttttactgccgctgtaagagatagcgatttgtacatcgccttttttcaacgcctgggaaacggtggcttgtacgtgcgtgtcggcttcgcaggccacgcgatagccaattttcatcagtttgaacgacagatcgcgccccaccagcgccgatccgcccaggcccgttatctggataaacggtgctttactgatgacctcaatgattttttgcagccgcgcgtaatcgagcaacgcgcaggtttgctccagcgccagctctttttcgcgattcagtttgcgcgcgatcacttccagcgaatcatcactggtaatcgaactgtgcaggtgcagtgccgtggcattcgttttctcccggctggcactgtattcgcctattaacgccatacgcaattcagtaaatccttgcgcgccgagtttttgggcaaatttcactatgctcgactggctaatgccgagctgtttcgccatctgccgtgaagaaacggattgcagctcactcacgttggcctgcagaaagtcagcgattttttgctcgttttcggtgaattcactccccgcattgcttattttcgtcaggtacaacatcttccactctcctgggctggcagcataaattccgcttaagttcttatgacgctcttcacactctgcgagtgtagactcaatgattcctttaagcctgtcaattcgggatatatgattccatacatctgcaattatttgatcgtaaatagtaaggtcaccaccgatgcaatttgaaaagatgattactgaaggctcgaacaccgcctcggctgaaattgaccgcgtatcgacgctggaaatgtgccggattatcaacgatgaagataaaaccgtaccgcttgccgttgagcgcgtactgccggatatcgccgcggcgatcgatgttatccacgcccaggtaagcggcggcgggcgtctgatttacctcggtgcgggaacatccggtcgtctggggattctggatgccagcgaatgtccgcccacctacggcgtgaaaccgggtctggtggttggtttgattgctggcggcgaatatgccattcagcacgcggtggaaggcgcggaagatagccgggaaggcggtgttaatgatctgaaaaatattaatttaacggcacaggatgtggtggttggcattgctgccagcggtcgcacgccgtatgtgattgccggactggaatacgcacgccagctcggctgccgcacagtgggaatttcctgtaatccggggagcgccgtttcaaccaccgctgagtttgccattacaccgattgtaggtgccgaagttgttaccggttcttcgcggatgaaagcaggtacagcgcagaaactggtgctcaatatgctttccaccgggctgatgattaaatccggcaaagtgttcggcaacctgatggtcgatgtggtcgccaccaacgaaaaactgcatgtgcgacaggtcaatattgttaaaaacgccaccggatgtagcgcagagcaagcggaagcggcgttaattgcttgcgagcgcaactgtaaaacggccattgtgatggtgctgaaaaatctcgatgccgcagaagctaaaaaacgcctggatcaacacggcggctttattcgtcaggttttagacaaggaataacccatggccaaagagatcagcagtgaacttctgaacaccattcttacccgtgtcggcggaccgggaaatatcgccagttgtggtaactgtatgacgcgcctgcgtctgggtgtacatgacagttcactggttgatcccaatatcaaaacgctggaaggcgtgaagggcgtcattttgaccagcgaccaggtgcaggtcgtttttgggcctggtaaagcgcatcgtgccgcaaaagcgatgagcgagctgctgggagaagcaccggtacaggatgccgcagaaatcgccgcccagaacaaacgtcagttaaaagccaaacaaacctccggcgtgcaacaatttctcgccaaattcgccaccatcttcacgccgctgatccccggttttattgccgccggtctgctgctggggatagcgacgttaattgccacggtgatgcacgttccggcagatgctcagggaacactacccgatgcgctgaattttatgaaggtgttcagcaaaggtttgttcactttcctggtgattctggtgggctataacgccgcccaggcatttggcggcacgggcgtaaatggcgcaattatcgccgcgctctttttgctcggttataaccccgcagcgaccaccggttactacgccggttttcacgatttctttggtctgcccatcgatccgcgcggcaatattatcggcgtgctgattgccgcgtgggcctgcgcccgcattgaaggcatggtgcgccgctttatgccggacgatctcgacatgctgctgacctcgttaatcaccctgctgatcaccgctacgcttgcgtacctgatcattatgccgctgggtggctggttattcgaaggtatgtcatggctgtttatgcacctgaacagtaatccgttcggttgtgcggttttagccgggctgttcctgatcgccgtggtatttggcgtgcatcagggctttattcctgtttacctcgcgttaatggacagccagggattcaacagcttatttcccatcctttcaatggcaggcgcgggccaggtgggcgcggcgctggcactctactggcgggcgcaaccgcacagtgcgctacgcagtcaggtacgcggggcgattattcccggcctgctgggcgttggtgaaccgctgatttacggtgtcaccctgccccgcatgaagccgtttgttaccgcctgtttaggcggcgcggcgggcggtttgtttatcggcctgatagcctggtggggtctgccgatgggcttaaacagcgcctttgggccgtctggtctggtagcgctgccgctgatgacttccgcacaaggcatccttccggccatggcggtttatgctggcgggattctggtggcatgggtttgcgggtttattttcaccacgctctttggctgccgtaacgtcaatctggactgatatcatgaaacggacaatgctctatctttctctgctggctgttagttgtagcgtcagcgccgcaaaataccctgttctgacagaaagctcgccagagaaagcaggggttaacgtcgaacggcttaaccagatggatcgctggattagccagcaagttgatgtcggttatcccagcgtaaacctgctgatcattaaagataatcagattgtgtatcgcaaagcctggggagcggcgaaaaagtacgatggcagcgtgttgatggaacagcctgtcaaagccaccaccgggacgctgtatgacctggcctcaaacaccaaaatgtacgccacgaacttcgccctgcaaaagctgatgagcgaaggcaaactgcatcctgacgatcggattgcgaaatatattccggggtttgccgatagtccaaatgacaccattaaaggcaaaaacaccctgcggatttctgacctgctgcatcacagcggcggtttcccggcagatccgcaatacccgaataaagcggtcgcgggcgcgttatattcccaggataaaggccagacgctggagatgatcaagcgcacgccgctggaatatcagcccggcagcaaacatatctacagcgatgtcgattatatgctgcttggatttatcgtcgagtcggttaccggtcagccgcttgaccgctatgttgaagagtcgatttatcgcccgctcggcctgacacatacggtatttaacccgctgctgaaaggctttaaaccgcaacaaattgccgccacggaattgaacggcaatacccgcgatggcgtgatccatttcccgaatatccgcacctccactctctggggtcaggtgcacgatgaaaaagccttttattcgatgggcggcgtttccgggcacgcaggtttgttttccaataccggcgatattgcggtgttaatgcaaacgatgctgaacggcgggggctatggtgatgtgcagctgttcaatgcggaaacggtgaagatgttcaccaccagctctaaggaagatgccacttttggcctcggctggcgcgtgaatggtaatgccaccatgacgccgacgtttggcacgctggcaagcccgcaaacctacggtcacactggctggaccggaacggtgaccgttatcgatccggtgaatcatatgacgattgtgatgttaagcaacaagccacattcgccggttgccgatccgcaaaagaatcccaatatgttcgaaagcggtcagttgccgattgcaacttatggttgggtagttgatcaggtgtatgcggcgttaaagcagaagtaataaaaaggccagtcagtaatgttactgcctagcctttaatcaatgaatcagaaacgcttacagcgccatcaacttgtccagcgacggtgcgaaataatagccgccggttaccggtttggtgaaacgcaacatcgcatcacgcttaccatcggtatcgccaaacatgctcagcagttgctgctcaatgttatgcagacgcgcgcagtaggcgcagaagtacagaccgtgagtgccactggcagtgccgtacggcaggctctggcgaacaatcttcagccctttgccatcttctttcagatcaacgcgggtgaggtgagaggtttccggacgttcgtcgccgtcgatctcttcgttggcctctttggtgcgcccgatcatcatctcctgatcgtgaacgctcatccggttgagctgcttcaggttgtgttcccaacgctggacaaacacatagctgccgcccgcatccacgccgtctttgataaccgccacttcgcgacgcgtctcttcacccgccgggttttccgtaccgtcaacaaagccgctcaggtcacgctcttcaacccaacggaagccgtggatctcttctttcacttcaatgcagtcaccaaaggcttccatcgccgcctgggcgacagagaagtttacgtcgtgacgcagagaaagaatgtggatcaacacatcgaactgggtcgtcggcgcaaggcctttaccgtagcccggaaaatctttcagctcttctgccccaacgccgccgctcagagcgcgccaggtgttgttaccaaaggcaaccaccgcaccaagatgcgcgtccgggaatttcgcttcaaaagttgccagtttgtcggcaaatgttttactggccgcacgcagggcgtcaacttcccctttcacgttggcttcgatccaaatcgccgcgcggcaatgttctggcaaaatgccactctgaacctgagacattgttcctcctgaaaataataatgccacgcaatccgtggcattgttgagcgctattttacgtgttttttcgcggcggcggtttgttcagacgcaaattaacgccgccagataattttactgactttccagtttttcagggtatcgtccgaaggcattaacccttcaggaccacgccattccccgctgaactggtagctaatatgttgactgccttcggctttacattcgacggcacgattatcatcaccatcagctttttggcaattgccaaatgctttgctgtaaaggtcgctaaacggtgtaccgattttaacaccggtgtcagcaggaatatcgctatccagcacgtcaatgcgactgatcgtgccttgatcgccgttaatcaccatcgccacgttgtcgcccttcatcacttcaaaaaagcgcaccacgttgccgttcgcggttttcattccgctgcgcaggcgataatcgccatcaagcgcatcggcaatggcttgttcttgcagtggtgtggacgccgttaattcacccacgccctgctcgctcactttggtggacgacccaaaccagttccacgggttagcggcagaccagttaactgacgacatcgtggaacagccggtcagcatcaatggcatagcgcataacattaaacgcagcgatttcatgtcacttcctttggttattcaataacgttgcttggagtgcaaattcaccaaaaagtgccgttattcttttacttcattaaaacaagcgcgtaaacgtcgattggtcagcagccagattaacgccacaatatccgccactaccagcgccagaccgataccgctaacggattcaccgttcagccacagccacggttgccagcaaagtaaaaccacctgcgccaacagcaacagaaaatagagtacacgccaggtgcgaggaaacgtagcccgccgaccgctcaacaaaaacgccagcaccgccggaatgccaggaatcagccccagccagaaattatcgtgatcgggataaaacagatttagcagcgcagtaccctgctcgcgcgacgcaccggcaatgacaaacagcacccaggttcgcgcctgaagcaatagcacaagccagaagagcaagggtaaacgcaggcgaccgtgcgcatcataatggacaggatgaaactcagtactcttcatcttcaatcaaacgcttacccagactcagcacgtcggcgtgttcatatcccaggcgttcatacattccgagcaccatgtcgttatcttccggcacattgatctgaattttcgggcagccacgagcaatcagctttttctccagccgattaagcaacgcattggcaatcccacgcccacgaaactctggatgcacgccaagataataagcagacccgcgatgcccgtcataaccgcccatcaccgttccgaccacgtcaccgtttacctcagcgaccaaaaacaaactgacgtcatggttcatcttacgctcgatgtccatttccggatcgttccacggacgcagcaagtcgcaacgctcccaaagggtgatgacctcttcgaaatcttcctggcgaaatacgcgtatctccatggtattcgttacctttttgcgggttaaaaggctgattatggcgtgaacggtcgaattagccaatatctgacgaaaatcggttgaaaaagtggcataatggggagttgtcaactattgaaatgaaaagtaaaacaattctcaacagcaaaccgtcgtaacggattacgcgatacgatataacatctggaactttattattacaactcaggccgtatgagcacttttaaaccactaaaaacactcacttcgcgccgccaggtgctgaaagccggtttggctgccctgacgttgtcaggaatgtcgcaagccatcgccaaagacgaacttttaaaaaccagcaacggacacagcaagccgaaagccaaaaaatctggcggcaaacgtgtcgttgttctcgatccaggtcacggcggaattgataccggagcgatcggacgcaacggttcgaaagaaaaacatgtggtgctggcgattgctaaaaacgtccgttccattttgcgtaatcatgggattgatgcgcgtttaacgcgttctggcgatacgtttatcccactttacgatcgcgttgaaatcgcccataaacatggcgcagatctgtttatgtcaattcatgccgatggctttaccaacccgaaagctgccggtgcttcggtatttgccctctctaaccgtggggcaagtagcgcaatggcgaaatacctgtctgaacgcgaaaaccgcgccgatgaagttgccggtaaaaaggcgactgacaaggatcacctattgcaacaagtgctgtttgatctggtgcaaacagataccattaaaaatagtctgacgctcggctcgcatattctgaagaagattaagccggtgcataaactgcacagccgcaacaccgaacaagcggcatttgtggtgttgaaatcaccgtcggttccttcggtgctggtggaaacctcgtttatcaccaacccggaagaagaacggctgttaggcacggcggcgtttcgtcagaaaatcgccacagcgattgctgaaggcgtgatcagttatttccactggttcgacaaccagaaagcacattcgaaaaagcgataagttatgaaacccgacgcacaccaggttaaacagtttctgctcaaccttcaggatacgatttgtcagcagctgaccgccgtcgatggcgcagaatttgtcgaagatagttggcagcgcgaagctggcggcggcgggcgtagtcgggtgttgcgtaatggtggtgttttcgaacaggcaggcgtcaacttttcgcatgtccacggtgaggcgatgcctgcttccgccaccgctcatcgcccggaacttgccgggcgcagtttcgaggcgatgggcgtttcactggtagtgcatccgcataacccgtatgttcccaccagccacgcgaatgtgcggttttttattgccgaaaaaccgggtgccgatcccgtctggtggtttggcggtggcttcgacttaaccccattctatggttttgaagaagatgctattcactggcatcgcaccgcccgtgacctgtgcctgccatttggcgaagacgtttatccccgttacaaaaagtggtgcgacgaatacttctacctcaaacatcgcaacgaacagcgcggtattggcgggctgttctttgatgacctgaacacgccagatttcgaccgctgttttgcctttatgcaggcggtaggcaaaggctacaccgacgcttatttaccaattgtcgagcgacggaaagcgatggcctacggcgagcgcgagcgcaatttccagttatatcgtcgcggtcgttatgtcgagttcaatctggtctgggatcgcggcacgctgtttggcctgcaaactggcgggcgcaccgagtctatcctgatgtcaatgccgccactggtacgctgggaatatgattatcagccaaaagatggcagcccagaagcggcgttaagtgagtttattaaggtcagggattgggtgtaactccctcacccccactcccgcatccgctgatgcagcgtcagtgacggcttctcggaaaacagctgctggtaatccgtggcaaattgccccagatgccagaatccccactgcatggcggcgtcttttaccgtcatactttgcgaccacggacttatcagttcgcggcgtacggcgttcaggcgaatgcgtttcagccacgcgttcgggccaatgcctaaaatagcgtgaaacgcgttttgtagcgtgcggcggctgacatgcagttgattacacaaatccagcaccgtcaccggttcggacatgttttccagcacatattcacgggcgcgggaaagcaatcgacggtaactctgatgactgatgctttccgccgtcaccattggttgcgcttcttccagcatggcccccatcgccattagcaaattatcccccagcacttttcgcactgcaggctgatggagattttccggattctcgcaaaacgtcgccagcgcctgttggacaaagccccacagcgcggctttatgctgctctttcacttccagcgccgactggttacgcaacatatgtaatacccgatccgggttatgcaaaaagttagcctgccgggtgatgacatcttcagaaagcaccacgcccaggatcgtgtaatcatccggcgtgctcagttcaaattcagtgccaccagggcgggtggcgatttccgcgcttcccagacattgcgaaccgataaatccctgctcaccgcgcgtcgccggaatgccaaaccagaacgagttcggccagaccaggcacgactgacgcagcgccagaccggtgtattcacgaaaaacctgaatatcatcgagtagaatttccgtaaattcaccatgaaacttgcccggatgcagctgatcgtaaatctgctgccaggcggtaatcgttaaagcatgttcatagacatccgttgtctgtcgttgatgaacattatccacttcgaccttcggcgtgagcttcaggttttcgggtaagggttcatgataaagatggtgcaaattggctgtacgggtctttttcatgatgttaatgccgggtgttgtaggacacccggcacctccgacaggttaatggggcttgagacgataacgactactgcgtttacgtaacgtcccggcagaaaagagctgttcgagcgcatttctggctttttccagcggccagccaaagtgggcagccacttctcctgccgtcattccctgacgtactgatgttaacagcgccaacaactcgtcagcagattccgcgacgataactggcgcgtcgggttcccttacgggttgcttcggctggcggttaaagccagtaaccagccactgggtgtcatcgtctggccgaccgatctccttgcggctgatgacacgcccggtacgcatcgcggcagcacaacctgcgtccagcgccgcacgacacgccgccagatcgccttccaccaccagcgttaagcgaccagggtcaagcacttcgtgactgagcagacgaacgttagctgctttgagcatggcatccgctgcatctatcgcggcgaccatgccgtccacttccagcaatcccagtgcattgatcatcggcaacctccgttacgcacgctggattggattacgcgcgatttccagcactgcatcggtaaaggcgttacaggctgctttacacgctgcctggctaccggttaaaaatgctgccgagtagttggtttcagacggtggcgggacataggtcgccagctgtacgtcggcagacttcagggctgcatcaatgccataggtcgcttccagcggcggtgccaccagatacgccatcggatcgccaagcgtgatcccggcggttgatgagagataagaaccggtacgcgaaactacatgtgccaggaatgccgtatcttgcgcgtcattagcccactggaaagctgcgccattttcaatatgcgcaatcatcgcatccagacctgcacgcacttccgccgggtttggcccaccaagcataatcagcacttcaccggcagtcggtgacgggccgtgtgcagcgcccgcatatagcgagcggccatacaccacttccaccatcgcctgcttggtcgcttcatcagcggcaatgtaggtgacgtcatcggagtcggcagaaatcagaccgaggctacgaatatgcggcggcaatttcagttcacgcgcaaaatcggcgttaacggaggcaatcacccgcatagcggtgacagacggtcgaatcaaatctaaagctggcatgatgcctccttatcgggtcatgttgatgccggatgctttctgctccagcatacgtttcgccaaatccacaatgacggctgcggcttcaaccggcggcgtgccgccctggtgaatgttagagatacaggtgcgatcggcctcaacggtggtcgccatacgcggcgagtaaacggcgtagcaggagaggctttctgactgacccaaccccggacgttcgcccaccagcaggatcactactttcgcgccgaggatctcaccgatctgatcttcaatcttcacgcgaccataacgaacaaagaatggtgtaccgactttcagcccggcctgtttcaggcccgccatcagcggtggcaggatctcttcgtagttcacggtgatcgcatcagttgacaggccatcagaaataacgacctgtacgtccggattggcaacacactgcgctttcagcgcttcaacagcttctgcacacaggcggcggcccatatccgggcgagtcaggtagagatttttgtcgctaatttcagagcgtacttccagcaagccctgcgctttcacccactcttccggcacttctttcagtacggtatctttcgaacgagagtgatcggcaaggaaacgcagcagcgcctgcgtacgtggacgcggaccggcacgaccggtacaaacgcgggccacggtgctgcggcgcagttctgttaatacgtctgcgcgatgcggattttcaacaccaatccacgcttttgcttcagcggaacctaaatccagcgcacagctttccgaggtcaccggtgccgcacagttggtggtggcgcactttgcttctgacggcgcgggggccgcttgtcccattgacgccatcacgctgcgtacaatttcttcaatctgtttttgatccatgatatgttatctccgcgtcatcagaagaacagtgacggatcgcccgcccgtttggtcaggcgaccgtttgccataatgcccatcctttccagccagcgttcaaactccggtgacgggcgcaggttgagtaactgacgcacagtggcggtatcgtggaatgcggtggtctggtagttgagcatgatgtcatcacccagcggcatccccatgatgtagttgcagcctgcggtggcgagcaggatcatcaggttttcgttgaggttctggtcagcgtcagcgtggttggtataacagcagtcacagcccatagagatgccgctcagcttgcccataaagtgatcttctaagccagcacggataatctggcggtcgttgtagagatactccggcccaataaagccgaccacggtgttgacgataaacggatcgtaatgacgcgccagcccgtagttacgtgcttccatcgttacctggtctgcgccgaagttagcgccagcggatagcgcagagccttgtccggtttcgaagtagaggcagttttccccggcgatacggttgaactccgcgcccactgcgcgcgcttcgtcgagcatcgccagctccacgccaaactctttcagccctttttcgctgccacagatactctggaaaatcagcccgcccggtgcgccacgacggatcgcttcgatctgggtggtgacgtgcgccagtacacagccctgagttgggatgttgaatttgtcgatcacgccatagatggtatccaacacgcggcttaagttttccacgtcgtcagtcaccgggttaacgccgatcaccgcatcgcccaccccgaaggaaagcccttcgtagatttgcgcggcgatactttgcacgtcgtcacgggtgtcatttggctgcaaacgggcgctaaaggtgcccggaataccgatggtggtattggcctttttgattaccggcattttcttcgcgccgtagatcaggtccgcgttggagcaaatcttcgctaccgccgcgaccacttccgaggtcagccctttgcgggtaaaggcaatgtcgtccacgctggtttcatcgctcagcacatactcacgcagttcgctgatgctccagtttttaatctggttgtaggccgtttcgttaacatcgtcctgaatcagccgcgtcacgcagtcatcttcataggcaatcaccggattattgcggatgtccgctacggtcatttccgacaacacctgctttgccgccacgcgctcctgtgagcttgccgctgcgacgcccgccagcacatcccccgaacgcagttcgttggctttagccagcacctcttttacatccttaaactgatatacattgccgaacaatgtggtctttagtttcataagtcgttccctcaggaaggaaatgcgagtgatttcaccgtcaccggcacaaccgatccgccaaaaagaggcgtaccaatgtcgatatagtcccccgcgcggacaatcacttcgtcaatgactgccaacgggagttgttgtagctgtgggcgcaacaacatgcccagagctttaccaaagtcctgcccggccaccaccagcaggggatgcggattcggaaaacgcgcgacgaaatcgaccaacgcgttgatgaccgtcagtaccgcggcgtaacgcacaggcagcgaggcgggaagcgccagcacgtacgcgtcagttttgggatcaagatccagctgaatcagcgcctgttgccaggcccccaccagatccgtttcatcaatcgggatcgccaccggcaaattgcgcagcggcagttgtacgccctcaagccagattgtgctgccagagagcgaaagggtatgcgcgcccgcgccaatcaccgtggcgcgcacggtttgcgccggaaactgtacgttcatctcacgcaggcgcggatggtcatgcagcgcagttgccagcagcgggccaatatcggcaaaacagaacgggtcggcgggctggtggcgataacattcgcccacgccgccagaaagcgtaatgatttcgggcgtaacacctgcgggcagcaaaccggtttgcatcaatgcctgcgcgagcggtgagagcgttccgtcaatcacttcgacaatcagttctgccatccgccgggtcacctgcaccagctgcgcgccggtcagcgaacgggcgtcggtgcctgcaccgaagcactcatccacaatcatctgccccggtttatgagcgtaaaccacgcgcccgtggctgtcggtttccagcaggcgaccaccgacgttgaggcaggcagtgccgctgatttttccggcatcgaacagggcgtagttcgcggtgccaccgccgatgtcgatattcagtacccgacacagccgttgttcagaaagggtttgtgccccggctccgtgaccggcgatcacggattcgaggtgcggcccggcgctggcaacgacaaaatcgcccagcgactgagagagcgccatcaccgccgggcgagcattgcgggttttcgcgctttcaccggtgatgatgatggcaccagaatcaacgctttccggctcaatacccgcagcatgatattgctcgagtattaaggttttcagttccgcttcttttaaaccgccctgtttatcgacaggggtaaagaacaccggactttgccagctaatttcgcgtttaatgaattcgtagcgcggcacctgcgacaccgccgcacggttaaccagctccagccgggagaaaatcacctgggtggtggtggtgccgatatcgataccgacgctcaatagctggcgagtgttcacgattgtgcctccgcttcggttttagtcgcggtcgcgtcttcttttggcaccagcatcatcgccacgccaatcgccgttacgccgccgatcaacttgccgacaatcatcgggaagatcatggcgttcatgttggcagcggcgaagcctaagtggtcgcccagggcgaaagcagcggaaacggcgaaggcgcagttgatgactttgccgcgggtatccatctgcttcatcatgccgaacatcgggatgttgttggcaagcgttgccaccatgccggctgccgcgatgttgttcatattcagtactttaccgacgctcatcagcggtttttcaaaccagcgagtcagcagcagcaccatcggatacgcccctaacagaacgcaggagatagaaccgataacttcaatggcgcgcatcacctcaccgggtttatcgccaggggccataaagataggatccagaccggggatcagttcccagccaagcaggaatttcactaccgcagcggcaagaccgagggtgatcaatgcaacgaggaatttggcgaagatctggaagccgttgatcattttttccgggatgaatttcagccccagcgccaccagaatcgcaacaatgatcaccgggatcatgttcatcaggatcagggcgaaagtgaattccaccggctggccgttgatctgcacaccggagtacatagcaaccagaccaccagcgatacaaccaatcggaatggtcacaatgcccgccagcacgccgagcgccagataacgacggtcagaaggttcgataatgccgagcgccaccggaatggaaaacacaatcgttggccccatcatcgacccgagaattaacccagagtatagccacgcggctacgtcgccgcccgccagctctttggcgaggaagaagccgcccatatcgcacgccagcagtgttccggcgaacatcgatgggttagcgccgagcatttcgtaaaccggaataattaccggcccgagaacgtgagccagtaccggtgccagcgcggtcataccgaccatcgccaggcccagtgcgcccattgccataaagccttcttcgaactgaccgcctgatccttcgatacttttaccgaacttaccgaggaaacgagcagaaccgccgaactgcgacaggatcctgtctacggcagctatcagcataaagaacatcatgatgtacatgatgatttcgttaattcccatcgcctttactccctgttagttgttatttattggcggatgcggcgtaaacgccttatccgccctacatgtgcaatcccgtaggctggataagacgcggcaagcgtcgcatccggcaattgcaccgcgccactggcggatgcggcgtgaacgccttatccgccctacatgtgcaatcccgtaggctggataagatgcggcaagcgtcgcatccggcatttattgcgccgctgcgtacaggccgacaatctgctccaggctggcggtacgcgggttactgcgcagacaaatatcttccagcgcggcctgcgcccatgcgccgtaatgcgcagatgtcgcaccaacatcgcccagtcgtttaccaatcccaacttccgcaatcagctcacttaccgcgttaatagcgtcacgatcgtcggattttttagttcgcagtgcccgaccaatctgactaaagcgttcacgacaaaccatccggttaaattccatcaccgttggcagcaacatggcgttcgcgagaccgtgcggaatatgcagcgccgcgcccggctgatgcgccatcgcgtggcacaacccaagacccgcactggaaaacgccattcccgccatacatgaagccagcaacatgctctcgcgcgcggcaaggtcgtgaccgtagcccaccgctttcggcagcgatttgccaatcatcgcaatggcaccaatcgccagactgtcggtaaacggtgtagcgttcagggcgctgtatgcttcaatggcatgggttaacgcatcaatgccggtcatcgccgtgacatgcgacggcacaccttcggtcaatgcggcgtcgaggatcgccacatccggcatcagcgaggcatgggctaacacctgcttgcgcccgctcaccgcgtcgataatcaccgttacattggtggtttcagagccggttccggcggtagttggaatggcaatcagcggcaagcgcggttgcagaacgctggtttctgacatctctgccagcgtgctatccgggttcgtcaccagcaacgtcacggctttcgccgcatccagcaccgagccgccgccaaacgcgatcaccccatcacagcctgactcacgcaactgcgccacggctgcacacacgtcggtaatgcacggttcgcccaccggacatggccagagcgtcatggcgatacctttaacggtcaggctacgcgtcagcccggcggtcatccctgcctgatgcaaaaagctgtctgccatcacgaacagatgtttcagcccacgcgtttgcgcttgctgtccgcaactgctcaccgagcccggaccgcaaagcgtcaccggtggaacgctaaatgtttttacccgttgcagattcagggtatcgaacgcctgaaagagcgcggtctgcaattcattttgcatatagcccctccgctttctctcgcccactactggcgatcgccagcggggtcataaacaaactgtgctgcggtaaatgcacctgtaacgccgggaattgtttgcgaaacagttccgccacgcccggttgcatacaagagccgcccgccagccataaatcagtaatgccctgcccttcaatatgccgggcgacaatgtccgccattttttcgtacaccggtttcaccgcaggccaaatctcttcaccgtgaccgcgcttgtactgctccgcctcttccagcgaaatacggcgatttccggcgagagtcagagagatgtgatgtccgccggtggcttcatccgccgagtacgtcaccttgccctttttcacgatggcaatgccggtagtgccgccgccgatatccactacaccggcgttgtccagttgcagcagatccgcaactgcggttggctcatccagcacatggctcacttccagtccggcagattccagcacgttgatggaaatacgcgggtccgtacctggaggaaatgaagtcgccgcatggctaaaacgacgaccgaattgctgctcgagcgtgtcgagatggcgacgaacaatggtgacagcgccgaagaaatcccagacgatgccgtcgcgaaccacatcggcccagtcgaggcataccgccactggctgaccgtcgcggtcgacaaccatcgacaccacatcgcaggtgcccagatccacccccagccacagcggagattccgtcgcggcgggcgtctggttacacagcgttgccgccgtttgcagacgtggggtgagccattgttcgtcgtgcgccatctgttactccttaaacaatgcgaaacgcatcgactaatacacagcgacgcagacggacaaacgtacgcgcgctggttaccccttcaccggttggcgtggtgatggtcatggtggtccagccttccccgcccagccccagcccggcaatgcacggtccgttcttaacgaaaatgctggtatcaatagcattcgccatctggttcatgttttcgatgttgcgcgagtgcattgccgccgtgtggtggcaaccgccttccagtttcaccgctagcgcaatggcatccgccacgttggcgacgcgcacgacgggcaacaccggcatcatcagttcagtcacggcaaacggatgttctgcggtggtttccacaaacagcaggcgcgtttcttgcggaactttaaggccgattgccgccgcgattttgcctgcgtcgcgaccaacccagtcacggctgacggtgccttttccgcgctcgtcgatatttttcagcaacaccggttgcagctgctgcgcctgttctgcggtcagtttcaccgcgtgctggccttccatcagacgcatcagttcatcggctacgctatcaacaacaatcagtaccttttcgtcggcacaaatgatgttgttatcgaaagaagcgcctttgacgatggactgagcggcacgggcgaggtcggcggtttcatccaccactaccggcgggttgccagcgcctgcggcaatcagacgtttattggtgtgtttacgcgccgcttctactaccgcttcgccgccggttaccaccagcaggccgatacccggaaacttgaacaagcgttgcgcggtttcgatatccggatttgccacagtaaccagtaagttttccggcccacctgcggcaacaatcgcctggttgagcagcgtaatcgcccgctgggagacttttttcgccgccggatgcggggcaaaaatgacgctgttgcccgcggcaatcaggctgatggcgttgttaattacggttgccgccgggttagtggaaggcgtcaccgaagccaccacgccccagggtgcgttttcaattagggtcaggccgttgtcgccagtcagcacttgcggagagaggcactcaacgcctggtgtgccgcgcgcctgagcgacgttttttgcaaatttatcttcaacgcgccccatgccggtttcactgacggcaagttccgctaaatctctggcgtgtttttcgcctgcttcacgaatggcagcaatggctaactggcgcattgccacgctttttaacccttgctgggcgactttggctgccgcaacggcgtcatccagggacgcgaaaacgcccatctcatgaacggcggcggacggcgtgtcactgctttgcattttcagcagtaccgctttcaccacctgttcaatatcctgttgattcatgatgttctgccttatttgtggaaaattacctgaccgccagacaccacctcatcgacaatgccaatcacgcacagatcgaccggtgacgtttcgcttttatgcgcctggcgggcggaactgccactcaccagtaacacccactccccggttcccgcgccaatattgtcgatggcgacggcgcattgcccgtcaggattaccttgtggatcaatcatttccaccatcagcaatttgtcatgcgccagtccgtgatggcgtacggtacaaacaatttgtccagtgacgactgccagtttcatacccgcctccgtggcgtatttcaggtaaaagctccccctaccctccgcagaaggtaaaatgaaaaaggagagagcgtgacgcccgaatcgacgtcacacagggtgattacaggttgctgctatcgcctttcaggccgatcgggaagacttcttccaggtcgccgtgcggacgcgggataacgtgtacagataccagctcgccgatacgctgtgccgctgcggcacctgcatcggtcgcggctttacaggctgcaacatcaccacgaaccatggcagtacacaggccgccgccaatctgcttaacaccaaccagcttgacgcgcgcagctttcaccatcgcgtcagaagcctcaatcagtgcaaccaggccccgggtttcgatcattcctaatgcttccattgtgctttcctctttatcagggtccagaacgggaccgttcattcaaccagtgtttgtaaactgctttcgcggttcacttctgtctgacgcggcacagctgccaccagcgccagctcgataatttcctgcacgctacaaccacgagagagatcgtgcatcggcgcggcaagtccttgtatcagtggcccgacggcacgatatccgccgagtcgttgtgcgattttgtaaccaatatttccggcttccagcgacggaaaaaccatcacattggccttgccctgtagcgggctggcaggcgctttttgcgccgccacttccggcacgaaggcggcgtcaaactgtaactcgccatccaccaccagctttggtgcgcgctcacggacgatttctgtcgcctgctggacgttagcaacacaggggtgacgggcgctaccattgctggaaaacgacagcatcgccacgcgcggctcttctccggtgatggcgcgccaggtttcggcactggcaagcgcgatatccgccagctgcgccgccgtcggctgtggcaccacgctgcaatcggcaaagcccaacgccgggccgctgtactgtggcaacatcaggaaaatggaagagagcgttttacagcctggctgcaagccgataatgcgtaatccggcacgcagcacatttgccgtggaagagaggttgcccgcgatacagacatccgctttaccggcgctgaccattgctgcggcgaacatcagagggtcggtaagtttttccagcgcatccggcggcgttttttcgcccgcgcgggccagccagcgatgagcaaattcttcccgcattgcgaggttgccatgcggatcaatcacctgtagcccgtccatcgccacgccgtgactgagcgcaaactgacgaagttcaaacggattggcgaccagaatgggcgttgccagaccttgttgatgtaaatattgcgcggctttcagcacacgttggtctaacgcatccggaaaaaccactctggcgggcgctcgcaacgccagttcacgacaacgttcaataatcattgcgtttcccccagtcgttgttggatctgcttcaccgttagcggctgcttcgttacgctcaggatcatcatcacgtagaccgtgctcgaaaggcggttcagcgcctgcaaaatgtccgggcgtaatacttcaaagctgcgggtgataaagacctgcgccgctacggtttcggtttcccgcactttggtgcgtagcagattgagcaacgcagcatcgcgcccgtggctggcttccggcaccagatgatcgtggtcgagatagcgcagcggctgatgagaaagccgatgcagatcttcgtcagaaagcccgacaatcgcctggcagcccagcggttcccccagcgcatcggcgcgcataatgttgccaagacgcgaacggatatccgccagccacggctgccacggttccgccagttcaatttgcagccacactgccagcgcaatggtgctgtcgagaaccgcgcgaaaacccagacgcggatcgcttttggcgaccattttttccgccgacaggtgagtcagcgtatccggcttttttgccaccggctggcgacacagttcgcagcacgcctgcggatgttcatcgctactggtcagcccatgaacgggctgcggctgctgctgttcatcgtcaacaaacaggcggccctgctcgtcaataaacttgatgcgcagatggcggctttccagcaactcccgggcagagggcgtcaggcgactgtccgcagggagatggatctctgcgccttcgctgagcgtatggttcgctcttagccatgcttcggtgatgaaatctttcatagggattgccagttagccggccaggcgacatacaggaatttcacgctggatgtcgtaccaaattcgatgctggagcctttcgggataaacatcacgtcgcctgctttggcgatcatggtttggccttcgtggcgaacatgcagctccccttccagcaccatgtcgatttcgtcgtagttcagggtccacgggaagaatgcgttctcccactgcataaaaccggcggccatgctgctgccgtcgtctccggtcacaagatcagtcaagcccacgcaatgcggctctgcgccgtcgaaacgaccaaacttgacgctactgccatcaatcactttgatgccgcctttgccggtcaccgatttgaagctcggctgcattgcgccctgctccagcgactgtttttccttcatcactttttccatcagctgtgcgaccaggctttcggtaaactggccttccggcagctgggcaatgatggtttcgcggatgcgctggctttcggttttgtcggctggcacgctggcgggcacggacgccgttaccgggatcgattcatcacattcggtgatggtaaaacccagtagatccgccacttcacgggcttccggggtaataatgctggcgcgcagaaccacggacattgcctgttcgccgcgcgcgtgtgcttcacgaatatcattcgctgtgatgagttttttcacctgcttcctcctgtttggtgagagatgccagataatccaccagttgctgcacgctttgcgggtcgtggctgtttagctcgaaaatcggctcttcgaagcccgtctcaagcaataactttcgcgttgcggcgacgtcagcatctggcatgtccgttttactgatgacggcgatttgccgtttgctgacgccaatatccagcaacccggcaggcaaccgactttccgggtcatttgcgccatggacatagatcagcatgtctacatcctgtagcgtggtaattaaggcgtgataccagcggggatggttaaaatattcacccggcgtatcaatatcgcccttatcattaaattccacggcctgtgtttttctggcgagggtataattcccctgcaacgcattaaataacgttgtttttcctgccccgacgctacccacaaacgcaattcgtttcatgaatgcctcgtattaacttttggtcatttcacaaagcgtataatttaataagcgacctaaaccgctgacggtttgtgataacgcttcttctactgcgcccaccgagccataaatcaccaatgcaccgctgaatcggtcgagaaaaccgatatgcacatcagcggctttcagcgctaaatcaccggcgatcatcgccgtttcgccgggagttagcgtcataatgccaattgcgcccgcatccggaacgccgattttcttcgccagttcctcaccgggatgcgcgatgagatgcgccagtgtgacctgtttgccgggcacaaattcctgaatgatgcgttctttatccatgagtcgccgcctgtgaaaaactttcgtgtatcgtgacaatttttcgtcagagtaaataacaaaattcggcaagcgcgtttaaaaggtgaggtagatcactaagaatggagagatattcgctgtggtgcataaactttcatatgcaacgcatgaatataaataaaataatatcgagatattatatagactgcttttttttattattcgcaaactcagtaataagctttactaatatattgcagctaaactgcttaccctgaatattcagggtaagcgtgagagttaaaaaaaattacagcggttgggtttgcgcttctaccacggccagcgccaccatgttgacgatacgacgcaccgatgcgatcggcgttaacacgtgaaccggtttcgccacacccatcagcaccgggccgacagtcacaccttccgagctggaaacacgcagtaagttgtaactaatgcgggcagcttccatgttcggcatcaccagaatattggcggaacctttcaaagagctgtccggcatacggtcgttgcgaatcgcttccaccagcgctgcatcgccgtgcatttcaccatcaatcatcagttctggtgcacgttccctgaccagttccagcgcctgacgcattttgctcgacgacgggcagtcagaagaaccaaagttggagtgcgacaacaaagcaacgcgcggctcaataccaaaacgacggacagtttctgccgccatcaaggtgatctccgccagctcttctgcatccggttcatcattaacatatgtatcggcaataaaggtgttaccactcggcagcagcagcgcgttcatggcacctgcggtgtgaacgccatcgcgataaccaaagacatttttcaccacgctaaaatgttcatgataatcacccaccgtaccgcaaatcattgcatcggcttccccacgctgaaccatgatcgcgccgatcactgtcgggttactgatcagcgcccgctgcgcctgttcctgagtgacgccgcgacgcttcatgatctggaagtattcggtccagtactctttaaagcgcggatcggattcgttattgacgatctcaaaatcaacgcccgctttgatctgcaagcccagtttctgaatgcgcatttcgatcacgttcggacgaccgataaggatcggtttcgccagtcccagcgttaccagttcctgagtggcatgcagaacgcgcgcctcttccccttccggcagaacaacgcgcttcggcgctttgcgagcctgggagaaaatcggcttcataaacaggttggttttgtaaacgaactcagtcagcttgtcgatgtagacgtcgaaatcagcaatcggacgagtcgccacgcccgactccatcgcggctttagcgaccgcaggagcgatcttaacgatcaagcgcggatcaaacggttttggaatgatgtattccggaccaaagctcagatcctgatcgccatacgctgaagccaccacttcgctctgttccgcatgggcgagttctgcaatcgcacgtaccgccgccagtttcatctcttcgttgatggcggttgcgccaacgtccagcgcgccacggaagatgaacgggaagcacaggacgttgttcacctggttcggatagtcagaacgaccggtgcaaatgatggcatccggacgcacttctttcgccagcggcggcagaatttccggttccgggttcgccagcgccaggatcattggcgcacgagccattttcttcaccatttcctgggtcagcactttcgggccggaacagcccaggaaaatatccgcgccttcaatcacatcatcgagggtacgtttgccgtcatccaccaccgcatatgcggctttggtttccgccatgtttggctcacggccctgatagataacgccttttgaatcgcaaaccacgatgttatgtttttgcagacccagcgctaccagcaggttcatacaggcgattgctgcggcacccgcgccggaaaccaccatccgcacgtcggagatgtttttctccaccacgcgcaagccgttgaggatggcggcagtgctgataattgccgtgccgtgctgatcgtcgtggaataccggaatattcatccgctcgcgcagtttctgttcaatatagaaacattctggcgctttaatgtcttcgaggttgatgccgccgaaggttggttcgagcgcggcgacaacttcaataaatttgtccgggtcgagttcgtcaacttcaatgtcaaatacatcaatcccggcgaatttcttaaacagaacgcccttgccttccatcaccggtttgcctgccagcgcgccaatgttgcctaaccccagcaccgccgtaccgttagagatcaccgccaccaggttaccgcgggcggtatatttgtaggcttttaacgggtctttttcgatttcaagacaaggtgcggcaacgcctggtgagtaggccagcgccagatcgcgctgtgttgccagaggcttggttggagaaacctggattttccctggaactggaaattcatggaaatcaagtgcactttgttttaactggtcatccatttggttgttcctttcacgtaacgttcacaaataaagtgtgtgggcaacagcccctgcccacaacgtggcgcacattattaccctgccggagtctacagactttgagcaagtccaaactctcaccattaatataatgttttggtaataatcctataacactgatgttacctgcttaatccagcaataccatgcctgtctgctatgcttttttgatgcgtttagcgaaatttctcagaagtgtgaattaacgcactcatctaacactttacttttcaaggagtatttcctatgaacgagttagacggcatcaaacagttcaccactgtcgtggcagacagcggcgatattgagtccattcgccattatcatccccaggatgccaccaccaatccttcgctgttactcaaagctgccggattatcacaatatgagcatttaatagacgatgctatcgcctggggtaaaaaaaatggcaagacccaggaacaacaggtggtcgcagcgtgtgacaaactggcggtcaatttcggtgctgaaatcctcaaaatcgtacccggtcgcgtgtcaacagaagttgatgcacgcctctcttttgataaagaaaagagtattgagaaggcgcgccatctggtggacttgtatcagcaacaaggcgttgagaaatcacgcattctgatcaagctggcttcgacctgggaaggaattcgcgcggcagaagagctggaaaaagaaggtattaactgcaacctgacgctgctgttttcttttgcacaggcacgggcctgtgcggaagcaggcgtttttctgatttcgccgtttgtcgggcgtatttatgactggtatcaggcacgcaagccgatggacccgtatgtggtggaagaagatccgggcgttaaatcggtgcgcaatatctacgactactataagcaacaccactatgaaaccattgtgatgggcgcgagcttccgtcgcaccgaacaaatcctcgccttaaccggctgcgatcgactgactatcgcaccgaatttactgaaggagctgcaggaaaaagtttcgccagtggtacgtaaattaatcccaccttctcagacgttcccacgcccagctcccatgagcgaagcggagttccgttgggagcacaatcaggatgcgatggcggtagaaaaactgtctgaaggcattcgtctgttcgccgttgatcaacgcaaactggaagatcttcttgccgccaaactataaaccagccacggagtgttatatgtcccgaaaagaccttgccaatgcgattcgcgcactcagtatggatgcggtacaaaaagccaactctggtcatcccggcgcgccgatgggcatggctgatattgccgaagtgctgtggaacgattttcttaaacataaccctaccgacccaacctggtatgatcgcgaccgctttattctttccaacggtcacgcgtcgatgctgctctacagtttgctacatctgaccggttacgacctgccgctggaagaactgaagaacttccgtcagttgcattcgaaaaccccaggccacccggagattggctatacgccaggcgttgaaaccaccaccggcccgcttggacaaggtttggcgaacgccgtcgggctggcgatagcagagcgtacactggcggcgcagtttaaccagccagaccatgagatcgtcgatcacttcacctatgtgtttatgggcgacggctgcctgatggaaggtatttcccacgaagtctgttcgctggcaggcacgctgggactgggcaagctgattggtttttacgatcacaacggtatttccatcgacggtgaaacagaaggctggtttaccgacgatacggcaaaacgttttgaagcctatcactggcatgtgatccatgaaatcgacggtcacgatccgcaggcggtgaaggaagcgatccttgaagcgcaaagcgtgaaagataagccgtcgctgattatctgccgtacggtgattggctttggttcgccgaataaagcaggtaaggaagaggcgcacggcgcaccactgggggaagaagaagtggcgctggcacggcaaaaactgggctggcaccatccgccatttgagatccctaaagagatttatcacgcctgggatgcccgtgaaaaaggcgaaaaagcgcagcagagctggaatgagaagtttgccgcctataaaaaggctcatccgcaactggcagaagagtttacccgacggatgagcggtggtttaccgaaggactgggagaaaacgactcagaaatatatcaatgagttacaggcaaatccggcgaaaatcgctacccgtaaggcttcgcaaaatacgcttaacgcttacgggccgatgctgcctgagttgctcggcggttcggcggatctggctcccagcaacctgaccatctggaaaggttctgtttcgctgaaggaagatccagcgggcaactacattcactacggggtgcgtgaatttggcatgaccgctatcgccaacggcatcgcgcaccacggcggctttgtgccgtataccgcgacgttcctgatgtttgttgaatacgcccgtaacgccgcgcggatggcggcactgatgaaagcgcggcagattatggtttatacccacgactcaattggcctgggcgaagatggtccgacgcaccaggctgttgagcaactggccagcctgcgcttaacgccaaatttcagcacctggcgaccgtgcgatcaggtggaagcggcggtgggctggaagctggcggttgagcgccacaacggaccgacggcactgatcctctcaaggcagaatctggcccaggtggaacgtacgccggatcaggttaaagagattgctcgtggcggttatgtgctgaaagacagcggcggtaagccagatattattctgattgccaccggttcagagatggaaattaccctgcaagcggcagagaaattagcaggagaaggtcgcaatgtacgcgtagtttccctgccctcgaccgatattttcgacgcccaggatgaggaatatcgggagtcggtgttgccttctaacgttgcggctcgcgtggcggtggaagcaggtattgccgattactggtacaagtatgttggtctgaaaggggcaattgtcgggatgacgggttacggggaatctgctccggcggataagctgttcccgttctttggctttaccgccgagaatattgtggcaaaagcgcataaggtgctgggagtgaaaggtgcctgatggtgattgccggatgctgattgccggatgcgacgctgacgcgtcttatccggcctacatgtcccgccattttgtttaacgggtgatccacaacgtgggccaggcgtctggcccatgccagttatcgcaggtgggttctgcggcgtaacgcaccaggcgaaaacgctgaccgtcaaagcgccagcgcgcctgaatgccacaatcgcttaatccgcgccctttcgctaaggtcaccagttcacgcgatttctcatcaaatgttgcgttcatcagttccagttcattcgtctcctgaccgttgttgaacggcaaacgcaaccgaaccgggcgcgaagctagtggctttttacgcgacacaatccatgccaaatcaatggtgttataggcccctgcctcacagctaatcatcatcagcgctttatcatcagtcagcgcagtgacattcacctcacgacgcaatggatcaagcgagcagcgcagaccattcatccgccagtttccataatccagcaaatcgttgcgttcttcgagtgagagtggcgtcggcgttgggttaaccaccgcgacctctttcagcgcaggcgcgggcggtacgctgagcggcggttcgtcccctttcttgatccacgcggtttcactgccaacgcgcttttgctgagcatcaataaacaacaacgctgcttttaagccactcagagaaatggtctgatcgccatcgcgtaaggtgattgccttcccttcctgaatcatctgcaaaaacgcggtgatggttgccgtatcatcggttactaataaccatggtgaaatccgccacttgtcaccacttaacgccaacggctcgccatctaacagcagccgtggcgctatctccccttctgacgcctccggcgacttcaatccgccgcgctcaatacgtaaaacggcatcggtatgcgccccggcgctgcggctcagggtcatcaccagtccattatgatcgcccgtattacgcgccacgcagaaattttggttattacaggtgacctgccagtcggaaaacgcccgttgcgctggtgccgcccacaccaaagacgtcggcaacaaagcgaaaaaaaagagaaggaaaatgcgatagcgcatggacggtacgaccccagaagttcaaacaaacagcacaagtcgtatcttcgttgcgcaggtagcgcggctcaatcggatttgtcggattgagccaataataaacaacgaaatattattgttatttttcagtccattaaatgtgacgtttgcaaatagttaagcaataacaccgtcttaccgtcacgtatctcgccggttttgatcatctccagcgcctggctgaacggcagctcgagcacttcaatatcttcatcttcgacaccgccaccggcgttagcgcgctgattgtcactgtattcggcgataaaaaagtggattagctcagtcacaccgcctggcgacatatacagttcaaataatttgcgcacttcacccacttcatagcccgtctcttcaatcgcttctttgcgaatacacacttccggttcgtcgttatccagcagcccggcgcagctttcaatcagctgcccgctttcattgccattaacccaggtagcgacacggaactgacgaatcagaaccacggtctttttcttcgtgttgtacaggaggatcgtcgcaccattgccgcgatcgtacacttcacgtttatggcggataacttcgccgtctttgcgcgtgagatcgtaagtaatgttgtgcagggtgaaatagttatcggagagaattttgtctttaatgagggtgatttgttgcgtcataccgactccacagcgcgaaatgaacaattatcttacgctgtgaagtcgggtttgtctgcgcaggctatcagtgagatttgactgattttacccccagccagtcaataatcccctgtgccgcatgacgtccttctgccattgcggtaaccaccagatccgcaccacgcacggcgtcaccaccagcgaagattttcggattggtggtctggtaacggtactggctttccacatccgcgatgatgcggccccatttgtctaccgttacaccgtgcgactccagccacggcatcccgtgcggattgaagccaaacgccataatcaccgcgtcggctggcatgacaaattcactgccttccaccggcactggacgccgacgcccctgggcatccggctctccaagacgcgtacgcaggaaacgaatcccgcagacgtgaccttgttcattcagctcaagcgccaccggctggacgttaaattcgaagttggccccctcttcgcgggcgttcttcacttctttcttcgagcctggcatgttagcttcatcacgacgataagcgcaggtgacgttactcgcgccgtggcgcagtgcggtacgcacacagtccatcgcggtgtcgccgccgcccagtaccacgacgttaagtccggcggtattgataaacggctcttccggtagctcttcgagccccatcacctgtttagtgttggcaatgaggaacggcagcgcgtcataaacgcccggcgcatcttcattgggtaaacccgctttcatggaacggtaagtgcctacgccaacgaagaccgcgtcgtattgttccaaaagcgaatccaaagagacatctttacccacttcacaattgagttcgaagtgaatccccatcgcgctgaagatttcccgacggcgtgccagcagggatttatccagtttgaaagaaggaatgccgaaagtgagcaagccaccgatttctggatggcgatcgtacaccgtcacccccacgccattgcgggtcagaacatccgcacaggccagccctgccggacctgcaccgataatcgccacccgcttgtccactttggtgacatggcttaagtcaggacgccaacctttcgccaacgcctgatctgaaatgtagcgttcaatgttgccgatagttaccgcgccgtgctcatcgcgaatagtacaggcaccttcacacaaacggtcttgcggacaaacgcgtccggtaatttccggcagggtgttggtctggtgagaaagctcgacggcggcgtcgatgtttccggctttcaccagttcaatccactgcggtatatggttatgcagcgggcaggtccattcacaaacgctgtgctcgccgcacttaaggcagcgcgaggcttcccgttgtgcctggtcggcgcgaaatggcagataaatttcatcaaaaccggttttgcgcgcttcaatcgccagtttatccggctcgccacgcgcgggcgttgcctgcatttgttcgactttactcattaccggcatttcttgcgccgcggtactggcatgccacggttgatgttcctgacgcgcggtgcgcaagcggcgggatttcgccatgccggagagtgcgacgtcagtgaccagttgcagcgcgtccgccgggcaattctcaacacaggcaggaccgttttcgcgccccgcacaaaggtcgcatttatgcgccgtggcttttacttttcctgccgcgacgggtgtcaggacgatttgcatcgtaccaaaaggacaggccaccacgcaggatttacagccaatacacttttgctgattgacctgaatgctgtcatcaacgtggctgattgcgccattagggcagctacgggcgcagggcgcatcttcacaatggtgacaggtcactgcactacgttgctgttgatgtttgataaccgtaattcggggatgaaaatggtgttggctcaggacatgttgctcatcattgtgagccatgacacaggcgatttcacaagcatgacaacccagacattgctgactgttggccataataaaacgattcataacgaccttcttttttggttgtaaaaaccttattctttatatgagtgttgttattacccgacttacaggggaatcggcaatgttcatgtgcccagaataagtaactatttcgctataaactgtggcagatcaaataatcccatcactgactaaattgcgtttcagcgaactggaacattaatgattttttgtggagaagacgcgtgtgattgttaaacgacccgtctcggccagtctggcccgggcctttttttacattgtgctgctgtcgattctttccacgggtatcgctctgctaactctggcgagcagtttgcgcgacgctgaggctatcaatattgccggatcgctgcgtatgcagagttaccgcctgggctacgacttgcaaagtggcagtccacaactcaatgcacatcgccagttatttcagcaggcactgcattcaccggtattaaccaacctcaacgtctggtatgtgccagaagcagtaaaaactcgctatgcgcatctgaatgccaactggctggagatgaataatcggctcagcaagggcgatttgccgtggtatcaggccaatattaataattatgttaatcagatagacctgttcgtactggctttacagcactacgctgaacgcaaaatgctgctggtggtggcgatttccctggctggcggcatcggtattttcacgctggtcttttttactttgcgccgcatacgccatcaggtggttgccccgctgaatcagctggttaccgccagtcagcgtattgaacacgggcagttcgactcgccgccgctggataccaacctgccgaatgagcttggtctgcttgcaaaaacctttaaccagatgtcgagcgagctgcataaattgtaccgttcgctggaagcgtcagtagaagaaaagacccgcgatctccacgaggccaagcgtcgtctggaggtgttgtatcagtgttcgcaggcgctgaacactagccagattgatgtgcattgtttccgccatattttgcagattgttcgcgacaatgaagcggctgaatatctggagttaaatgtcggtgaaaactggcggattagcgaagggcaaccaaacccggaattgccgatgcagattttaccggtgacaatgcaagagacggtttacggcgaactgcactggcaaaatagtcacgtttcatcatcagaaccgctgcttaacagcgtttcgtcgatgctgggacgcggtttgtactttaatcaggcgcagaagcattttcagcaattattgttgatggaagaacgtgcgaccatcgcccgcgaattgcacgactcgctggctcaggtactttcttacttacgtatccagttgacgttactgaagcgttcgataccggaagataacgccaccgcacaaagtatcatggccgatttttcccaggcgttgaatgatgcttatcggcagttacgcgagctgttgactactttccgcctgacgctgcagcaggcggatctcccctccgcattgagggaaatgctggatacgttacaaaatcaaaccagcgccaaactgaccctcgactgccgtctgccaaccctggcactggatgcgcaaatgcaggtgcatttgttgcaaattattcgcgaagcggtgctgaatgcgatgaagcacgccaacgccagcgaaatcgccgtcagttgcgtcaccgcgccggacggcaatcacacggtttatatccgtgataacgggattggtatcggtgaaccgaaagaacccgaaggtcattatggtctgaatatcatgcgcgaacgcgcggaacggctaggtgggacgctgactttttcacaaccttccggcggcggcacgttagtgagtattagctttcgctctgcggagggtgaggaaagtcagttaatgtaatgcctcctactgaccaaagaatacttgcacttaaggttcagtataaaagggcatgataatttacattaactcctttttttctccacgattggctcgtaccttgccgctacagtgaagcaagtcaagcctacaacgatacgcagaaacacgaggtcctcttttaatggcgaatttctttattgatcgccccatttttgcctgggtgctggcaatcctgttgtgtctgacaggtaccctggcgattttttcattgcccgttgaacaataccccgatctcgcgccaccgaatgtgcgagtgaccgctaactatcccggcgcatcggcccagacgctggaaaacaccgtgacccaggttatcgagcaaaatatgaccggcctcgataatctcatgtatatgtcatctcagagcagtggcaccggtcaggcatctgtcactttaagttttaaagcaggcaccgatccggacgaagccgtgcagcaagtacaaaaccagctgcaatcagccatgcgaaagttaccgcaggcggtgcaaaatcagggcgtgacggtgcgtaaaaccggcgataccaacattctgaccattgccttcgtctctaccgatggttcgatggataaacaggatattgctgattatgttgccagtaatattcaggacccgttaagccgcgtgaatggcgtcggggatatcgatgcctatggttcgcaatattccatgcgtatctggctggacccggcgaaactcaacagtttccagatgacggctaaagatgtcactgatgccattgagtcacagaacgcgcagattgcggttgggcaacttggtggtacaccttccgtcgataagcaggcgctcaacgccaccattaacgcccagtcactgctgcaaacaccagaacagttccgcgatatcaccttgcgggtcaatcaggacggctcagaggtaaggctgggcgatgtcgccaccgtcgaaatgggggcggagaaatacgattatcttagccgcttcaatggtaagccagcctccgggctggggggaaaactggcctccggcgctaacgaaatggcgacagcggagctggtgctcaatcgtctcgacgagctggcgcagtatttcccgcatggactggaatacaaggtggcgtatgaaaccacctcgtttgttaaagcctccattgaagacgtggtgaaaacgctgctggaagctatcgctctggttttcctcgttatgtatctgttcctgcaaaacttccgcgccacgctgatacccactatcgccgtgccggtggtgttgatgggaaccttctccgtactttacgccttcggttacagcgtcaacaccttaaccatgttcgcgatggtgctggcgatcggtctgctggtggatgacgccatcgtggtggtggaaaacgtcgaacgtattatgagtgaggaaggactcactcctcgcgaagccacacgtaaatcgatggggcagatccagggggcactggtcgggattgcgatggttctttcggcggtatttgtaccaatggccttcttcggcggcaccaccggtgccatctatcgccagttctctattaccattgttgcggcgatggtgctgtcagtactggtagcgatgatcctcactccggctctgtgtgccacactacttaagccactgaaaaaaggtgagcatcatgggcaaaaaggcttttttgcctggtttaaccagatgtttaaccgcaacgccgaacgctacgaaaaaggggtggcgaaaattctccaccgtagcctgcgctggattgtgatttatgtcctgctgcttggcggcatggtgttcctgttcctgcgtttgccgacgtcgttcttaccgctggaagaccgtggcatgtttactacctcggtacagttgcccagcggttcaacgcaacaacagaccctgaaagtcgttgagcaaatcgagaaatactacttcacccatgaaaaagacaacatcatgtcggtgtttgccaccgttggttctggccctgggggtaacgggcaaaacgtggcgcgaatgtttatccgcctgaaagactggagcgaacgcgacagtaagaccggcacctcgtttgccattatcgagcgtgcaacgaaggcgtttaaccaaattaaagaagctcgcgttatcgccagcagcccgccagcaattagcggtcttggtagttctgcaggttttgatatggagttgcaggaccacgctggagcgggtcacgatgcgctgatggcagcacgtaatcagttgctggcgctggcggcggaaaacccggagctaacccgtgtgcgccataacggcctcgacgacagtccgcagttgcagattgatatcgaccagcgtaaagctcaggcgctgggcgttgctatcgacgatattaacgacacactgcaaaccgcctggggttcgagctatgtgaatgactttatggatcgcggtcgcgtgaagaaagtctatgtgcaggcagctgcgccgtatcgcatgctgccagatgacatcaatctctggtatgtccgaaataaagatggcggcatggtgcccttctctgctttcgcgacctcacgctgggaaacaggctcgccgcgtctggaacgctataacggttattctgcggttgagattgttggggaagccgcaccgggggtcagtaccggtacggcgatggatattatggaatcgttagtgaagcagctgccaaacggctttggtctggagtggacggcgatgtcgtatcaggagcggctttccggcgcgcaggctccggcgctgtacgccatttccttgctggtggtattcctgtgtctggctgcgttgtatgaaagctggtcggtgccgttctcggtaatgctggtcgtgccgctgggggtaatcggcgcgctgctggcaacctggatgcgcgggctggaaaacgacgtttacttccaggtgggcctgttaacggtcattggtttatcggcgaaaaacgccatcctgatcgtcgagtttgctaacgagatgaaccaaaaaggccacgacctgtttgaagcgacgctccacgcctgccgtcagcgtttacgcccgattctgatgacctcgctggcatttatcttcggcgtattgccaatggcaaccagcacgggtgccggttccggtggtcagcatgcggtgggtactggcgtaatgggcgggatgatttcggccactattctggctatttacttcgtgccgctgttctttgtgctggtgcgccgccgcttcccgctgaagccgcgcccggaataagcaataaaaaaggcgacatgccaatgtgtcgcctttttcaactttccgattaagaacctgctcagcgggttcttgctgtttgtactttgtctcaggaattacttacgaagcataacttcgataaagtctttccagttccccagttcacgttcaatcataacaacctctcttataattatgggtattctacggaaacaatataccgtggtgaagctaatttactcgattgctgcgatgactacctccgggggacaaatcttatgtaaatactatggtcctgcggtgatgatttgtatgtgatacacagcaacatttcgagatattcatacggcatctaatactgatttaattctggttaaaatacagacagataacaagatgaatattcttaatgtttacgttaaaaatgtttaatattatttaatagttgttaatttgaatacttcgataatgttatatttcctgataatcatttgcaggcaaaatgttttcacccttaaatgagtatttattctcataaatcgaaaaaggattcattatggttacactttacggtatcaaaaattgtgacaccattaaaaaggctcgccgttggctggaagccaataacatcgactatcgttttcatgattaccgcgtcgatgggctggacagcgaattattgaacgattttatcaacgaattaggctgggaagcgttactcaacacccgtggtacaacctggcgtaaactggacgaaaccacccgcaataaaatcaccgatgcggcctctgcggcggcattaatgactgaaatgcctgcaattatcaaacgtccattgctctgcgtgcccggtaagcctatgctgctgggtttcagtgattccagttatcagcaatttttccatgaggtgtagtctatgtcgtgcccggttattgagctgacacaacagcttattcgccgcccttccctgagtcctgatgatgcaggatgccaggctttgttgattgaacgtttgcaggcgatcggttttaccgttgaacgcatggactttgccgatacgcagaatttttgggcatggcgtgggcagggtgaaacgttagcctttgccgggcataccgacgtggtgccgcctggcgacgccgatcgttggatcaatcccccgtttgaacccaccattcgtgacggcatgttattcgggcgcggtgcggcagatatgaaaggctcgctggcggcgatggtggtggcggcagaacgttttgtcgcacaacatcccaaccatacggggcgactggcatttctgatcacctctgatgaagaagccagtgcccacaacggtacggtaaaagtcgtcgaagcgttaatggcacgtaatgagcgtctcgattactgcctggttggcgaaccgtcgagtatcgaagtggtaggtgatgtggtgaaaaatggtcgtcgcggatcattaacctgcaaccttaccattcatggcgttcaggggcatgttgcctacccacatctggctgacaatccggtacatcgcgcagcacctttccttaatgaattagtggctattgagtgggatcagggcaatgaattcttcccggcgaccagtatgcagattgccaatattcaggcgggaacgggcagtaacaacgttattccgggtgaactgtttgtgcagtttaacttccgcttcagcaccgaactgactgatgagatgatcaaagcgcaggtgcttgccctgcttgaaaaacatcaactgcgctatacggtggattggtggctttccgggcagccatttttgaccgcgcgcggtaaactggtggatgcggtcgttaacgcggttgagcactataatgaaattaaaccgcagctactgaccacaggcggaacgtccgacgggcgctttattgcccgcatgggggcgcaggtggtggaactcgggccggtcaatgccactattcataaaattaatgaatgtgtgaacgctgccgacctgcagctacttgcccgtatgtatcaacgtatcatggaacagctcgtcgcctgatgagtggttctgcaagaggaaataagcatggactggctggctaaatattggtggattctggtgattgtctttttggtaggcgtcctgctgaacgtgattaaagatctcaagcgcgtcgaccataagaaatttctcgccaacaagccggagcttcccccgcatcgtgatttcaacgataagtgggacgatgacgacgactggccgaaaaaggatcaaccgaagaagtaagctgagtgctcaaccgtaggccggataaggcgttaacgccgcatccggcaatggtgaacgatgcctgatgcgacgctcacgcgtcttatcaggccaggtaatctgtcttttacatcatttcaatcacatcatcatcgccaggcttaccgccacttagcgcttcgtcgaaataatgtttcggaatggtataacgcaagtgatccagggcaaattgcatactgcgattgtcgatcgcatggcctaaatcctccacgatatccagcgtcacgtcaccaccggcactgattaacgcttcctgcgcagcaaccgcatgcgccagatcgataaccggatcttcaccgccatgaatcaggtgaattgtcgtggctgtagacgcagtttccggcaggctcgcatagcgtccgttaaaagcaatgacgcgtgaagcaaggcccggttcggctttaatgctctccagcaccataatcgcgccttgagagaaaccgatgagcgccgtggcgttagcccctactccgctctgtttctgccagtagcgcaccgtttcaataaacgtcggcatgatcgcatccacacgcgcctggcgattatcttccgtaataccctgcaccgaaaaccactgacgccccgccggattaccgctcggctccgcgccaccgacactcaccaccagcgcatcaggaaacagcggtgcaaaccagttgcctatttcccccattgccaccgggttatccccgacaccgtggaaaagcagtaacaactgttgcgcaggtttatccgggctttgaacaacaaaatggtcatgtttcatggcgaactccttaactgatgtcattaattttacgccgctgactcacaatgaccatgagataaaattgaaggagtcagtgaaataattgccattgcgttatgcgatcgcgcagacgctcagtgcgaacatcattaagtgcgaacagcgcctgcgcggcctcttcccgctgacggaccagtaacatcttgcggcctgaaagtttaagtgtggtacataactgcgcatcactggcgtttttctgtaaacgcccacgcagcgccggtaatgccagttcactggtttgtaacagacgcaataagcaacctaacgacgttaatagcggacgatgagcgaaagcaaaaccggccagttcaagccagtcgtcgtcagaaaggacggcatcgtttagtggatcaacaggaagcgtttcgccattccactgcgcgagagcttgcgcatcgcgacgtaaacggtaatgctcacgttcagccagctgtttacccgcatcactcatcggtaacagcgccatcgccgtatagcaaccgctgctggcttcccgatgattacccatccgcaccagcacaaaaccgcagcgttgccagaaacgccataactccccggtgtaaccaaaactcaccgaaagatagtcgaggtcttgcgtatattgcaaagcaccagcaataagttgccgccctgtgccttcccgctgacgagccggatgaactgctatccggctgacccgccgtccacgcaatgtcgccgccagtggattgttgccgtgcgccgccagcgactgggccaccagattaccccgcgggcgacgaaaacctgcccataccgcctgactgagttgttgagataatccaccctcatccaccagccacagcgccccggcaatctcgttttcgccagccgcctgtaaaaaatgttgccctggtgcatccatcatccggcgtaaatccagcggcgaagtccgatagtgcgcaccagacaagagctgataaacctttaacggcgtttctggatcgctttgccataacgtctgttcaaatgcggaaatgacaatattgccttgtggtgtatgggtgaagttttcatcgtcaaaaaccagtgcctcgctgaccattttttccagcgggcatccctgcgcccagcggatcggctgttgcagttcaaaacggtgtaaatgcggaaagcgagcgcaaaatttcagcaaaaaaccacgtccggtgccttcgtagccctgcaccgtagtggttaacaacgttcgaggaaaacgcgataccagttgatgcaacaatggcgcaggtatggctgcggcttcatcgaccaccagccagtcggcttgctcatcgctggctaacaaggcatccggcgcaataaagcgaaacttctcgcccgcaaattgtgccagtacatccgttgacgcttttgcgggcgcggtgacaatcgctctgcccgcaatacgagaaatgagttgccctgccaacgccgacttaccgcgcccacgcgcagccgttaccgctgccacgcccggcggcatggtcattagctgctttaagagttgctgttgttctggttgtggtgcgccagtcgcggggtaccagtcagtacggggagtaaaatgcgccaacgagaatggctggttttgccgccagaggatagcctcgttatccgccgtaagtacgcgtttgagatgctggacaaaatgcggcgtcgcaatagggtcagggcaatcactccagcgcagcgagtcggcatcaggttggttttcccactcttcccatacagggagtaacaaaaccagccagcttcccgctttcaacgttccgctaagtgcggcaaaggcagcggcatcaaagccgtggcgggcgtcgaataccgcatgccggaactcgcgcccaagtaaagtttgtagtgccgagggagaacagtggttttcagcatctggccgcggcgaaatccacagccagtcgccaggtaaggcatcacgcaacttaagagtatgctcaaaacaccaaccctcttccccgctcaacaccagcaagcggcggatcccttcacgtttcatttgcgctgttaatgtgtgaagcgcagtcagttcagccatccctgccccggaagttaaatgcttttaccaaaagtattgcattgtgccggatcgccgctgtcgaaaccacgtttaaaccagctgtagcgttgctgagaagtgccatgagtgaaactgtctggtactactcgcccctgactttgctgttgtaaacggtcatcgccgatggcctgcgccgcgttcagcgcctcttccagatcgccggtttccagaacgccttgctgctgcatactatgcccccagacaccggcaaaacagtcggcctggagttccatacgcacagataagcggtttacttccgcctgcgtcgcgttttgttgcagttgacgaactttcggctcgatgcctaacagtttctgcacatgatgaccgacttcatgggcgataacgtacccctgggcaaaatcgccatccgcgccaagtttgtctttcatgtcatcatagaaggagagatcgatataaaccgtgccatccgccgggcaatagaacggccccattatggactggcccgccccgcagccggtacgcgtcattccacggtacatgaccagcttcggttgctgataggtcttacccatcttctcgaactgttgtccccaggtgtcttccgtggttgccagaatcaccgaggtgaattttgcggcttcgtcttcatttgggctaattgaccgcgttgattgttgttgggaaaccggctgcccggtcatcaacccggttaaatcaacaccatagtagcctgcaaccagcacgactatcagtaaaatcagcccgcctttaccgcttggcaggcgaaaaccgggaccgcccatagatggaccaccagagctgttgcgcctgtcttcaacattgtcactttcacgtcgcccttgccaacgcatagatacctcaacaatatattcattatagaaatgatcgtaggtggttcagaggaagattaccacaggaaagcgggatgaaatggcggaggaatgagcgttcaatgcatatattccgagagcggttgtcttgccgtgccagctgcacggcaagatgatgaacagaaaaatcagtccagctgtacacccaggcggcgggcgacggcttcataggcttcgatcaggccaccgaggctctggcggaaacggtctttgtccattttctccagcgtttctttgtcccacaggcggctaccgtccggggagaactcatcacccagtaccacttcgcctttgtacagaccaaattccagcttgaagtcgaccagaatcagaccagcatcatcgaacagttttttcagcacgtcgttcgctttgtaggtcagctctttcatacgcgccaggttctctttgctcacccagccaaaggtttcgcagtaagattcgttgaccatcggatcgtgcatggcgtcgtttttcaggaacagatcgaacagcggcgggttcagctcaataccttcttcgattccaagacgtttcaccagagagccagcagcacggttacgcacgacacactcaaccggcaccatatccagctttttcaccagacattcggtatcggagagcagacgctccatttgagtcgggatacccgcttcagccagtttgctcataatgaagtagttgaacttgttgttcaccatacctttgcgatcaaactgctcaatgcgcgcgccatcccctgctgacgtatcattgcggaattcgagcaccaacaggtccgggttttccgtgctgtatacggttttcgctttaccacgatacaactcagcttgcttttgcatctttatcactcctgggtgtgaattaacgttttaaaatcttttgctgtctggtgtgccggatgttttgtcggatgcggcgtgaacgccttatccgaactacgtccgacaaacaaatttcgtgcgaattaccgctaaaatcgcgttttcctgcagacgcacacgtttgcgtatcatatcagaaaaaagggccggatgattccagccctgtatttttacttgctaaacgcagcctggaagacagctaccagcgcgtcgttctgactctgagtcagagtatgacctttcggatcgatgaactgtaggctgctgcggttatctaaatcgccaacctgcagtttatagtcaccggatgccaggcctggatcgctcgcgcccagttcctgccagtcgctgtcagacagcggcttataagttacggccatgttgccctgcgaacgggtgctgtcggtcactttcatgcccactttttccagcgccgctggcagacgttgccaaaccacattgaacggcccgcgtacgaccagcattggtaaaccggtgtcatcagctgcactttgtacgtccatagtggtggaggcacgattttgcgcagcgttcgcggcgtcagtggcagatttatccagaccggcggaaataacgttcatcatctccgtgctgtaacgctgcatggaagccgcgtctgcaaccggtttgcccgcctgttccaggttcagcagtttaaccgtaaccgcctgctgataaccctgcggcttaacagagatttgataacgaccacgatactgctcgtcttcgtccagacggttccattgtacccaatcggtggtcagtgtctgaccagcatcatcacgttgggtgatggtgtagtttttcgcctgcagcacgctaaccacctgcggccacagagtattgccacgaccattttccaccagcaatgaagcggtatcgcccgtgaactgggtacgcgcgccagaaaccagtgccagcggctgggctggtggacgaatgtccagcgccttaccgacagcaccactaccgttggtcaccgggattgcataatcaccggaggtcaccggcaaaatcattccagccggggcatgaagctccgcaagcggtgccgcttccaggtaggcttcatcaccactgacctgacgcttatagcgtgagtcagaactacaggcagcgagtaataaaacaagcgaaacacccgcaacctttgccaggcgcgacttttgaacagagtaagccatcaaatctccctaaactttacagcaaaccggcatgcttaagcgccgctctgaccgtctcacgaccactgtcggtgattggtgtcattggcaggcgcagcgtatcggtcgccacaagccccagttccttacatgcccatttcaccgggattggattgggttcgacaaatagtttgttgtgtaatggcatcagacgctgattaataacgcgtgcctcggcaaaatgcccttctgctgccagtttgcacatctgggccatatcacgcgctgcgacgttagccgtaacggaaataaccccatgaccgcccaattgcatgaagtccagcgcgctcgcatcatcgccgctcagcagaacaaaatcatctgaaaccagctctttgatctggtttacacgcgttaagttccctgttgcctctttgattccgataatattttttactttcgccagacggcccaccgtttccgggagcagatcgcagccagtacgggacggcacattatacagaatttgcggcaggtcagtatgctcagcgatggctttgaaatgctgatacaaaccttcttgcgacggacgattgtagtaaggggttaccgtcaggcagccgacgataccactgtcattgaagcgctgcgtcaggctaatggcttccgcagtagcgttagcgccggtcccggcaattaccggaatgcgcccatcagccagatccagcgtcatcatcaccacatcagcatgttcgtcatgatttaaggtagcggactcgccagtggtgccaacagaaacgatcgccgaagtaccgctggcgacatgataatcaatcagttttttcaagctagcccgacagacattacctttttcatccatcggagtaacaatcgcgacaatacttcccgtgaacatgggccatcctctgtgcaaacaagtgtctcaatggtacgtttggtatggcattaaaagcaagcagacagaaccgttctgattgttgtatgcatgttttttttatgctttccttaagaacaactcaccccttaaaggaataaccagtttgacactgtcatcgcaacattatctggtgatcactgcgttgggtgccgatcgccctggaattgtgaacaccatcacccgtcatgtcagtagttgcggctgtaatattgaagacagtcgcctggcgatgctgggagaagagttcacgtttattatgctgctttccggttcatggaatgccattactctgattgaatcaacgttaccgttgaaaggtgccgaactggatcttttaatcgtgatgaagcgcacgacggcgcgtccgcgtccgccaatgccagcatctgtctgggttcaggtcgatgtggcagactccccgcatttaattgaacgcttcacagcacttttcgacgcgcatcatatgaacattgcggagctggtgtcgcgcacgcaacctgctgaaaatgaacgggctgcgcagttgcatattcagataaccgcccacagccccgcatctgcggacgcagcaaatattgagcaagcgttcaaagccctatgtacagaactcaatgcacaaggcagtattaacgtcgtcaattattcccaacatgatgaacaggatggagttaagtaatgaatccactgaaagccggtgatatcgcaccgaaatttagcttgccggatcaagacggagaacaagttaatttgaccgacttccagggacagcgtgttctggtttatttctacccgaaagccatgacccccggctgtaccgtacaggcctgcggcttacgcgataacatggatgagttgaaaaaagcgggcgttgatgtgctgggtatcagcaccgataaacccgaaaaactctcccgttttgcggaaaaagagctgcttaactttacgctcctgtctgatgaggaccaccaggtgtgcgaacaattcggcgtctggggtgaaaagtccttcatgggcaaaacctacgatggcattcatcgcatcagcttcctgattgacgctgatggcaaaatcgaacatgtctttgacgatttcaaaaccagcaatcaccacgacgttgtgctgaactggctgaaagaacacgcctgattactttgctccattccgtgctggctgcgcttgcggccagcatacctcacttctcgtgatcaagatcacattctcgctttcccctgcgacacgggtgtcgaatccattttttgctgaacgttaatgaccatcatttttgtaccgttcagaatccagttaatacataacttattgaatatattgagttaatcagaatggcatcctttatgcaatatgaaatgcaatgtttcatatcattttcaaggagccgacatgaaccgctttgtggtggccgaaccactgtggtgtacaggatgtaatacctgtctcgctgcctgttcggacgtgcataaaacgcaaggtttacagcaacacccgcgcctggccctggcgaagacgtcaacaatcactgcccctgtcgtgtgtcatcactgtgaggaagccccttgcctgcaggtctgcccggtcaatgccatctctcagagggatgatgcgatccaactcaacgaaagcctctgtattggctgcaagctttgcgccgtggtctgcccatttggcgcaatcagcgcttcaggaagccgtccggtgaatgcccatgcgcaatatgtttttcaggctgaaggctcactcaaagacggcgaagaaaacgcgccaacacaacatgctttgctgcgctgggaacctggtgtccagaccgtcgcggtgaaatgcgacctgtgtgatttcttgccagaaggtccggcctgcgttcgcgcttgcccgaatcaggcgttacggctgatcaccggtgatagcctgcaacgtcagatgaaagaaaaacagcgccttgccgcaagctggtttgccaatggcggggaggatcccctttccctcactcaggagcaacgctaatggatgccctgcaattattaacctggtcgctgattctctatctgtttgctagtctggcttcgctgtttttactcggtctggacagactggctattaagctttccggcatcacatcgctggtgggcggcgtgattggcatcatcagcggaattacgcaattacatgctggtgtaactttagtcgcccgttttgccaccccttttgaatttgccgatttaaccctgcgaatggatagcctctcggcatttatggtgctggttatctccttgctggtggtggtttgttctctctattcattgacttatatgcgcgaatacgagggcaaaggcgcggcggcgatgggcttctttatgaatattttcatcgcatcgatggttgccctgctggtgatggacaacgctttttggttcatcgtgctgtttgaaatgatgtcgctgtcttcctggtttctggtcattgccaggcaggataaaacgtcgatcaacgctggcatgctctacttttttatcgcccacgccggatcggtgctgataatgatcgccttcttgctgatggggcgcgaaagcggcagcctcgattttgccagtttccgcacgctttcactttctccggggctggcgtcggcggtgttcctgctggcctttttcggttttggcgcgaaagccgggatgatgccgttgcacagctggttgccgcgcgctcaccctgccgcaccatcgcacgcttcggcgttgatgtctggcgtaatggtcaaaataggtattttcggcatcctgaaagtagcgatggatctgctggcgcaaacgggtttgcctctgtggtggggcattctggtgatggcgatcggcgcaatctccgcgctcctgggcgtgctatatgcgctggcggaacaggatatcaaacggctgctggcctggagtaccgtcgaaaacgtcggcattattttgctggcagtcggtgtggcgatggtcggtctgtcactgcacgacccgctgctcaccgtggttggactgctcggcgcactgtttcatctgctcaaccatgcgctgttcaaagggctgctatttctcggcgcgggagcgattatttcgcgtttgcatacccacgacatggaaaaaatgggggcactagcgaaacggatgccgtggacagccgcagcatgcctgattggttgcctcgcgatatcagccattcctccgctgaatggttttatcagcgaatggtacacctggcagtcgctgttctcactaagtcgtgtggaagccgtagcgctacaacttgcgggtcctattgctatggtaatgctggcagtcactggtgggctggcagtaatgtgcttcgtaaaaatgtacggtattactttctgtggtgcgccgcgcagtacacacgctgaagaggcacaggaagtgccaaatacgatgatcgtcgccatgctactgctcgcggcactctgcgtattaattgcgcttagtgccagttggctggcaccgaagataatgcatattgcccatgcgtttaccaatacccctcccgccactgtcgccagcggaatagcacttgtacccggcacgtttcatacacaggtcaccccctcattactgttgctgttactactggcgatgcctttgctgcctggcctttactggctgtggtgtcgttcgcgccgcgcagcgtttcgtcgcacaggagatgcctgggcatgcggctacggctgggaaaatgcgatggccccgtcaggcaatggcgtgatgcagccgctgcgtgtggtcttttctgcgctatttcgtctacgacaacagctcgaccctacgctgaggctaaataaaggtcttgcgcacgtcaccgccagggctcagagcacagaacccttctgggatgagcgggtgatccgccccatcgtgagcgccacccaacggctggccaaagaaatacagcatctgcaaagcggcgactttcgtctctattgcctgtatgtggtcgccgcactggttgtgctgctaatcgctattgccgtctgaggaaatcaccatgagacaaactctttgcgacggatatctggtcatttttgcgttagcacaggccgtgattctgctgatgctaaccccactttttacgggtatttcccggcagatacgcgcgcgtatgcactcccgccgcgggccggggatctggcaggattatcgcgatatccacaaactgtttaaacgccaggaagttgcgccgacatcttcaggtctgatgttccgcctgatgccgtgggtattaatcagcagcatgctggtgctggcgatggccttaccactgtttattaccgtttccccttttgcgggcggcggcgatctgatcacccttatctatcttcttgccctgtttcgttttttctttgctctttccgggctggataccggaagtccgtttgcgggagtcggtgccagtcgcgagttgacgctcggcattctggtcgaaccaatgcttattctctcactgctggtattggcgctgatagcaggttccacgcatatcgagatgatcagcaatacgctggcgatgggctggaactcgccgctaaccaccgtactggcgttactggcctgtggttttgcctgcttcattgagatgggaaaaattccctttgatgttgctgaagcagaacaggaattacaggaaggcccgctgaccgaatattccggtgccgggctggcgctagcgaaatgggggctggggctgaaacaggtcgtgatggcatcactgtttgtggccctgtttctgccctttgggcgcgcgcaagaactttctctcgcctgcctgctgacttcacttgtcgttacgctgctcaaggttttgctgatttttgtactggcctcaatcgcagaaaacacgctggcacgcgggcgttttttactcattcaccatgtgacctggcttggcttcagccttgctgcgcttgcatgggtcttctggttaaccggtctgtaaggagcactgacggaatatggaaaatcttgctctgacgacgttattgctgccttttatcggcgcactggtcgtttcgttttcgccacaacgtcgggccgccgaatggggggttttgttcgccgcgctgaccacgctgtgcatgttgtcactgatctccgcgttttatcaggccgataaagttgccgtcacgttgacgttggtcaacgtgggggatgtggcgttgtttggcctggtcattgatcgcgtgagtacgctgattctgtttgtggtggtgtttctcggtttgctggtcacgatctactccacgggttatctgacggataaaaatcgcgaacacccgcataacggcacgaatcgttattacgcatttttactggtgtttatcggcgcgatggcgggactggtactctcctcgacgctgctcggtcagttgttgttttttgaaattacaggcggctgctcctgggcgttgatcagttattaccagagcgataaagcgcagcgttcagcactaaaagcgttacttatcactcatatcggctcgttggggttgtatcttgccgccgccacgctgtttttgcagaccggaacgtttgcgcttagcgcgatgagcgagttacacggcgacgcacgttatctggtttatggcggcatcctgtttgccgcgtgggggaaatcggcccagctaccgatgcaagcgtggctaccggacgcaatggaagcgccaacaccgatcagcgcctatctccacgccgcatcgatggtgaaagtgggcgtttacatttttgcccgcgctattatcgacggcggcaatatcccgcatgtgattggcggcgttggcatggtcatggcactggtcaccattctttatggctttctgatgtatttgccacagcaggatatgaagcggttgctagcctggtcgaccatcactcaacttggctggatgttcttcggcttgtcgctctccatcttcggctcgcggctggcgctggagggcagcatcgcctacatcgtcaaccacgcgttcgctaaaagcctgtttttccttgtagcaggtgcgctgagttacagctgcggcacgcgcttgttgccgcgtctgcgtggcgtattgcacaccctgccgttgccaggcgtgggtttctgcgtggcagcgctggcgattaccggcgtgccgccgttcaacggcttcttcagtaaattcccgctgtttgctgccggttttgcgttgtcagtggagtactggatcctgctgcccgccatgattcttctgatgattgaatcggtcgccagtttcgcctggtttattcgctggtttggtcgcgttgtgcctggcaaaccgagcgaggccgtcgccgatgccgcaccgctgccaggatcaatgcgcctggtgttgattgtactgattgtgatgtcgctgatttccagcgtaatcgccgcgacctggttgcagtaaggagatgatgaatgaccggttctatgatcgtaaataatctggcgggactgatgatgctgacatcgctgtttgtgattagcgtcaaaagctatcgcctgtcatgcggattttacgcctgccagtcactggtgctggtgtctattttcgccactctctcgtgcctgttcgccgcagagcaactgctgatctggtccgccagcgcctttatcaccaaagtgctgctggtaccgttaatcatgacttacgctgcacgaaatattccccagaacatcccggaaaaagcgttattcggtccggcaatgatggcactgctcgcggcgttaattgtcctgctttgcgcatttgtcgttcagcccgtgaagctaccgatggctaccgggctgaaaccggcgctggcggtagcgttaggtcattttctgcttggcctgctgtgcattgtcagccagcgcaatatcctgcggcaaatttttggttactgcctgatggaaaacggctcccatctggtgctggcgcttcttgcctggcgagcaccggaactggtggaaataggtatcgctaccgacgccatcttcgccgtcattgtgatggtgttactggcaagaaaaatatggcgtacccacggcacgctggacgtgaacaacttgaccgcgctgaagggataatgagatgagttattctgtgatgttcgctttactcctgctcacgccgctgcttttttcgctgctctgttttgcctgccggaaacggagactttctgcgactcgcacggtgaccgtattacatagcttagggatcacactgctgctgattctggcactctgggtggtccaaactgccgctgatgcaggagaaatattcgctgcgggactgtggcttcatattgatggtctgggcggtttgttcctcgccattcttggtgtgattggctttctcaccggtatttactcgattggctacatgcgtcatgaagtggcacacggcgagctttcacccgttacgctgtgcgattactacggtttcttccatctgtttttgttcaccatgctgctggttgttaccagcaataacctgattgtgatgtgggcggcgatcgaagccaccaccttaagctcggcgtttctggtaggcatttacggtcagcgttcatcgctggaagctgcatggaagtacatcattatttgtactgttggtgtcgcttttggtctgttcggtaccgtgctggtatacgccaacgccgccagcgttatgccgcaggcagaaatggcgatattctggagcgaggttcttaagcaatcgtccttgcttgacccaacattaatgctgttggcctttgtgtttttgctaattggctttggtaccaaaaccgggctatttcccatgcacgcctggctgccggatgctcacagtgaagcgccgagtccggtcagcgccctgctctccgccgtattgctgaactgcgcgctgttggtgctgattcgctattacatcattatttgccaagccatcggcagcgatttccccaaccggttgttgctcatcttcggcatgttgtcggttgccgtggcggcatttttcattctggtacagcgggacattaagcgtctgctggcgtactccagcgtggagaacatggggctggtcgcggtggagctaggcattggcgggccgctgggaatttttgccgcgctgctgcacatcttaaaccacagtctggcaaaaacgctgctgttctgcggttccggcaatgtactgctcaagtacggcacgcgcgatctcaacgtcgtctgtgggatgctcaaaatcatgccatttaccgccgtgctgtttggcggcggtgcgctggcgctggcagggatgccgcccttcaacatttttcttagcgaatttatgaccattaccgccggactggcacgtaatcacctgctgattatcgtcctgctgttattgctgttaacgctggtgctggcgggcctggtacggatggctgcgcgggtgttaatggcgaaaccgccgcaggccgttaaccggggtgatctcggctggttgaccacctcgccaatggtgattctgctggtcatgatgctggcgatgggaacgcatattccacaacctgtcatcaggatcctggcgggcgcttccactatagtcctctcagggacgcacgatctgcctgcacaacgtagcacctggcatgattttttgccttcaggcaccgcatctgtttcggagaaacacagtgaacgttaattcatcgtcaaatcgtggcgaagcgattctcgccgccctgaaaacgcagttccccggcgcggtgctggatgaagagcgacaaacgcctgaacaggtcaccattacggtgaaaatcaatctgctgcctgacgttgtacagtatctttattatcaacatgatggctggcttccggtcctgtttggcaacgacgagcggacacttaacggtcattacgcggtttattatgccctttcaatggaaggggccgaaaaatgctggattgtggtgaaggcgctggtcgatgccgacagtcgggagtttccgtcagtcacaccgcgcgtccctgccgcggtctggggcgagcgagaaattcgcgatatgtacgggctgattccggttggcctgccggatcagcgtcgcctggtgttgcccgatgactggccggaagatatgcatccgctgcgcaaagatgcgatggattatcgactgcgccctgaaccgacgactgattccgaaacgtatccgtttatcaatgagggcaacagcgatgcgcgggtgatccctgtcggcccgctgcatatcacctccgatgaaccgggtcacttccgcttgtttgtggatggcgagcaaattgtcgatgctgattaccgcctgttttatgtccatcgcggcatggagaaactggcagaaacgcggatgggctacaacgaagtgaccttcttatcggaccgcgtgtgtgggatttgcggttttgcccacagtgtggcctataccaattcggttgaaaatgcactggggattgaggtgccgcaacgagcacatactattcgctcgattctgctggaagtcgaacggctacacagtcatttgcttaaccttggcctctcctgccatttcgttggttttgataccggctttatgcaatttttccgcgtgcgggaaaagtcgatgacgatggcggaattgctgatcgggtcgcgtaaaacctacggtctgaatctgattggtggtgttcgccgcgatattctcaaagagcaacgtctgcaaacgctgaaactggtgcgcgagatgcgcgccgacgtgtcggagctggtagagatgctgcttgctacgccgaatatggaacaacgcactcagggcattggcattctcgaccgacaaatcgcccgtgatttgcgctttgatcacccctacgccgactacggcaatattccaaaaacactgtttacctttaccggcggcgatgttttctcccgcgtgatggtccgtgtcaaagagacgtttgattcgctggcaatgctggaatttgccctcgacaacatgccggataccccactgctgaccgaaggctttagctataaacctcacgcattcgcgctgggctttgttgaagcgccacgcggtgaagacgtgcactggagcatgctcggtgataaccaaaaattgttccgctggcgctgccgtgccgccacctacgccaactggccggtgttgcgttacatgctgcgcggcaataccgtttctgacgcaccgctgattatcggtagccttgatccctgctactcctgtaccgaccgtgtgacgctggtagatgtgcgcaagcgccagtcaaaaaccgtgccgtataaagagatcgaacgctacggcattgatcgtaaccgttcgccgctgaagtaaggacagaagatgctgaagttactgaaaactattatgcgcgccggaaccgcgacggtgaaatatcccttcgcgccactggaggtcagccctggctttcgcggaaaaccggacctgatgcccagccaatgtattgcctgcggtgcctgcgcctgtgcttgtccggcaaatgcgctgactatccagaccgacgaccagcaaaattcgcgcacctggcagctctatctggggcgttgtatttactgcggacgttgtgaagaagtgtgcccgaccagagccatccagcttaccaataactttgaactgaccgtcaccaataaagccgatctctatacccgcgcgacgttccatctacaacgttgcagccgttgcgaacgcccgtttgccccgcaaaaaaccatcgcactggctgctgaattgttagcacagcaacaaaatgcgccacaaaaccgcgaaatgttgtgggcgcaagcgagcgtctgcccggaatgcaaacaacgcgcgacgctgatcaacgacgatacagatgtactgctggtggctaaggagcagctatgagtccagtgcttacacaacatgtcagccagcccatcacgctggacgagcaaacgcaaaagatgaagcggcatttgctacaggatatccgtcgctcggcttacgtttatcgcgtcgattgcggcggctgcaacgcctgtgaaatcgaaatttttgctgccattacaccagtattcgacgcagaacgttttggcattaaggttgtttcatcaccgcgtcacgccgatattttgttatttactggcgcagtcacccgggcgatgcgtatgcctgcacttcgggcgtatgagtctgcccccgatcataaaatttgtgtttcctacggcgcgtgcggtgtcggcggcggtattttccacgatctctacagcgtctggggcggtagcgacaccattgtccccattgatgtttggatccccggctgcccgccaacaccggccgccaccattcacggtttcgccgtggcgctcggtttgctgcaacagaagattcacgctgtggattatcgcgatcccaccggggtgactatgcaaccgttgtggccgcagatcccgccatcacagcgtatcgccattgagcgagaagcgcggcggctggcgggctatcgtcaggggcgagaaatttgcgatcggctcctgcgccatttaagcgacgatcctacaggaaatcgggttaacacctggttgcgcgatgccgacgatccacgtctcaatagtatcgttcagcaactctttcgcgtactccgggggttacatgactgaagagtgcggggaaattgttttctggacgctgcgaaaaaagtttgtcgccagtagcgacgagatgccggaacacagctctcaggtaatgtattactcgctagctatcggccatcacgttggcgtgattgattgtctgaatgtcgccttccgctgcccactgacggaatacgaagattggcttgcactggtcgaagaggagcaagcccgacgtaagatgctgggggtgatgacttttggtgagattgttattgacgccagccacaccgccctgttgacccgggcattcgcgccactggcggatgacgcgacgtctgtgtggcaggcgcgtagcattcaattcattcatctgttggatgaaattgtgcaggaaccggccatctatctgatggccagaaaaattgcgtgagaaggatttctcattaataaggactgttgatggctatgtcagacgaggcgatgtttgccccgccacaaggaataacaattgaagcggtaaacggaatgctcgcggagcggttagcacagaaacacggcaaggcgtctttattacgcgccttcatcccgctgccgccgccgttcagcccggtacaacttattgaactgcatgttctcaaaagcaacttctattaccgctaccatgatgatggcagcgatgtgacggcaacaacagagtatcagggcgagatggtcgattattcgcgtcacgccgtccttctcggcagtagtggaatggcggagctacgctttattcgcacccacggcagtcgttttacttcccaggattgcacactgtttaactggctggcgcggataatcaccccggttctgcaatcatggctcaatgatgaagaacagctggtggcgctgcgtttgctggagaaagatcgcgatcatcatcgggtactggttgatattactaatgcagtgctgtcacatcttgatctcgacgatctgatcgctgacgtcgctcgtgagatccatcattttttcggtctggcttcagtcagtatggtactgggcgatcatcgaaagaacgagaagttcagcctgtggtgcagcgatctttctgcctcacattgtgcgtgtctgccacgctgtatgcctggcgaaagtgtattgctgacacaaacgctacaaacccgacaaccgaccttgacgcaccgtgcagatgatctgtttctctggcaacgcgacccgttattactcttacttgcatctaacggctgcgaatctgcgctccttataccgcttacctttggcaaccatacaccgggtgcattgttgctggcgcatacctcttccactctctttagtgaggaaaactgccagctactacaacacatagccgatcgcatcgctattgccgttggcaatgccgatgcctggcgtagcatgaccgatttgcaggaaagtttgcagcaagaaaaccaccagcttagcgagcagctcctttcgaatctgggcatcggtgacattatctatcaaagccaggcaatggaagacctgctccagcaggtagatattgtggcgaagagcgacagtacggtgttgatttgtggtgaaaccggaactggcaaagaggtgatcgccagagcgatccatcaacttagcccgcgacgcgacaagccgctggtcaaaatcaactgcgctgccatccccgccagtcttctggaaagtgagttattcggtcatgacaaaggggcgtttactggtgcgattaatacccatcgtggtcgttttgaaattgccgatggcggcacgttgtttctcgatgaaattggcgatctgccgttagaacttcagcctaaactgctgcgcgtattgcaggagcgggagattgagcgtctcggcgggagtagaacgatcccggtgaatgtcagagtcattgccgccaccaaccgtgatttgtggcaaatggttgaagatcgccagtttcgcagcgatctcttttatcgcctgaatgtcttcccactggaattgccgccgctacgcgaccgtccggaagatatccctcttttagcaaaacatttcacgcaaaaaatggcgcgccatatgaatcgcgcaattgacgccatcccgaccgaggcactacgccagttgatgtcgtgggattggccgggcaacgtgcgcgagctggaaaacgtgattgagcgggcggtactgttgactcgtggtaacagtctgaatttacatctaaatgtccgacaaagccgtttactgccgacgctaaatgaagattcagcgcttcgcagttcaatggcgcagttactgcacccgacgacgccagagaatgacgaagaagaacgtcagcgcattgttcaggtattgcgagaaaccaatggcattgttgccgggccccgtggcgcagcgacgcgattagggatgaagcgcaccacgctgctgtcacgaatgcagcggctggggatctcggttcgcgaggtgttgtaatctgcttttgcaggagtatgcatgagaaacaaactctctttcgacttgcagttgagcgccagaaaagcggcaatcgctgaacggattgccgcccataaaattgcccgcagtaaagtgtcggtctttttaatggcgatgtccgctggcgtgtttatggcgatcggatttactttttacctttccgttatcgccgatgccccgtcttcacaggcattaacccatctggtgggcggcctttgctttacactcggctttattttgctggcggtttgcggcaccagcctgttcacctcgtcggtaatgacggtgatggcaaaaagtcggggcgttattagttggcgaacttggctgattaacgcacttctggtggcctgcggtaatctggcaggtattgcctgtttcagtttgttaatctggttttccgggctggtgatgagtgaaaacgcgatgtggggagtcgcggttttacactgcgccgagggcaaaatgcatcatacatttactgaatctgtcagcctcggcattatgtgcaatctgatggtttgcctggcgctgtggatgagttattgcgggcgttcgttatgcgacaaaatcgtcgccatgattttgcccatcaccctgtttgtcgccagtggctttgagcactgtatcgccaatttgtttgtgattccgttcgccattgccattgccattcgccatttcgcccctccccccttctggcagctggcgcacagtagcgcagacaattttccggcactgacggtcagccattttattaccgccaatctgctcccggtgatgctgggtaatattatcggcggtgcggtgctggtgagtatgtgttatcgggctatttatttacgtcaggaaccctgaaaaatcagcccggcgaaacagttcgtcgggctgaagattattcttgcgcgatttgcccatcgggccaggcatgaatcacggctttgatcagcgtcgccaacggaatggcgaagaatacgccccagaatccccacaaaccaccgaagatcaccaccgataaaataatcaccagcggatgcaggttaaccgcttcggagaacaacaccggcactaacaggttgccgtccagcgcctgaataatcagatacaccgcgaagcagctccagaattcagtacctgcgccaaactggaatagcgccacgccaaccaccggaatggtcaccacaaatgcgccaatgtacggaataagaaccgagaagccgaccagcactgccagcagcagcgaatagttcagcccgaagagcaagaaccccagccaggtggcgatccccaccacgatcatctccagcactttgccgcggatatagttggtgatttgttgattcatctccttccacacctgtcctgccagcccacggttacgcggcagcacccggcgaacggcgttcagcatctgctctttgtctttcagcaggaagaagaccatcaatggcaccagcaccagatagacggctatggtcagcaaaccgaccagcgaggcgagggaaattttcaccaccgaatcgcccatggtcagcatccgactgcgcatattttcggccattgcatcaataatgcccgcgtccattaacgccggatagcggcgcggcaacgtggcggcaaagtcagaaagcttattgagcatccccggcatatcgcggattaagtagatgccctgttgccaggcgataggcagtaccacgaacgccatcagtagcaatataccgacgaaaaccaccaatacaatcgacgtcgcccagcggcgggagcagccaatagattgcagacgcacggttggccattccagcaaataggccagcacaatagccaccagcaacggagcaagcaggccactaaagaaaaagataatgccaaatccggcaactaaaataaccagcaaggcaatcgcttccgggtcgctaaaacggcggcgataccattgcatcaacatttcgagcataaagaccttccctgaacctcaagagcgggattgcgatccgcaattgtatcgaaatgtcacaaaaaagacttcgctttttatgacggattcaggaaactgaaaagtcatttgagtgggctaatcttcgccgttacactcaaaggcggcgcggtgggaacgatatttcacagtatcggtcaaatgactatctccagaaatacaggatagaggttatgttcaggcagttgaaaaaaaacctggttgcaaccctcattgctgctatgaccattggtcaggtagccccggcgtttgccgacagcgcagacaccttgccggatatgggaacctccgcaggaagcacgctttccattggtcaggaaatgcagatgggcgactattatgtccgccagctacgcggcagcgcgccgttaattaatgacccgctgttaacgcaatatattaattcgctggggatgcgtctggtttcgcatgccaattcggttaagacaccgtttcatttttttctgatcaacaacgacgaaattaacgcctttgctttctttggcggcaacgtggtgctgcactctgccctgttccgttattccgataacgaaagtcaactggcttcagttatggcgcacgaaatctcccacgtcacccaacgtcacctggcgcgagcgatggaagatcagcagcgcagcgcgccgctgacctgggtcggcgcgttaggttctattttactggcgatggccagtccgcaggcggggatggcggcgctgaccggtacactggcgggaacgcgtcaggggatgatcagtttcacccagcaaaatgaacaggaagcggaccgcattggtattcaggtgctgcaacgctcgggattcgatccgcaggcgatgccaaccttcctcgaaaaattactcgatcaggcgcgttactcctcgcgcccgccggaaattttattgactcacccgttgccggaaagtcgtctggcagatgcccgcaaccgtgctaatcagatgcgcccgatggtggtgcagtcgtcggaagatttctatctggcgaaagcgcgcacactggggatgtataattccggacgtaaccagctcaccagtgatttgctggatgaatgggcgaaaggaaacgttcgtcagcaacgagcagcacaatatggtcgtgctttacaggcgatggaagccaataaatacgacgaggcgcgtaaaacgctgcaaccgttactggcggcagaacctggcaacgcatggtatctcgatctggctactgatatcgatcttgggcaaaacaaagccaatgaggcgatcaatcgtctgaaaaatgcccgcgatttacgcaccaatccggtgttgcagctcaacctggcgaacgcttatttgcaaggcggtcaaccacaagaagcggccaatattctgaatcgctacacctttaataataaagatgacagcaacggctgggatttgctggcacaggcggaagccgcgctaaataaccgcgatcaggagctggctgcgcgagcagaaggttatgcgctcgccggacgactcgatcaggccatttcgctgttgagtagcgccagttcgcaggtgaaattaggcagcctgcaacaagcgcgttacgatgcgcgcatcgaccagttgcgccagctgcaggaacgctttaagccttataccaagatgtaattcgcattaaaggaagaacaatgaccaaacaggtaaaaatctaccataacccacgctgttcaaagagccgggaaacgctgaacctgctgaaagaaaacggcgtggagccagaagtggtgctctaccttgagacacccgccgatgcggcaacgctgcgcgatttgctgaaaatactggggatgaatagcgcccgtgaattgatgcgccagaaagaggatctttataaagaactgaacctggctgacagttcgcttagcgaagaggcgctgattcaggcaatggtggataatccgaagctgatggagcgcccgattgtggtcgcgaatggcaaagcgcggattggtcgtccaccggagcaggtactggaaatcgtgggttaagatgtgctccatcgctagttgaagcacattgccggatgcgacgcttgccacgtcttatccggcctacgaatactatggattaacttcgcgtagttcggataaggcgttcgcgccgcatccgacaataaacaccttatctacaacttcagaatttctttcacaaacggaatggtcagcttacgttgcgcggtaatcgacgcacgatccaactgatccaacgtcataaatagcgtgcgcatttctctgtcgagccgcttcagcaagaaacgccccacatcttccggcagttcaaaaccacgcaaacgcgcgcgtaactgtagcgcctgcaacttatcttcatcagaaagtggctgcaatttgtagatctgcccccagtcgagtcgcgacgcgagatccggtaatcccagattcaactgccgcggtggacgatcgccggtgatcaacaaccgtgttttgcccgattccagaattcgattgtagagatcgaaaatcgccatctcccacaactcatcgcctgcaatacactcaatgttgtcgatacagaccagcgacaaatgctccataccgtcgagcacttccggaacaaaccaggtgcgtttatccagcgggacatagcccaccgcatcgccacgctgcgacaattccgcgcaagccgcgtgcagcagatggctgcgccccgcgccttcgcgtgcccagagatagatgtaaccgctatgttcctgacgcagcacgttttgcagcgcggccagtaaagaggagttatcccccggccagaaacttgcaaaggtttcgtcgtcaggaagataaagtggcaaagagagctgtgccggtgtgttcagagatacctcaaccaggatttcacaaaatcgcgagaagtttaccacagaatcccatgatgtttgaaccgggcagcaacactgcccggtcggtacattatttgtctgttatatccgcgtcttctgcgtccagcaccacttcttcagggcgcagcacactgatcagtttgaagatcaaacttaagccgataccgacgatggtcgccagcgccataccttttaactccgccgcgccgatgtttaccttcgcgccactgacgccgatgatcaaaatcacggaagtcaggatcaggttctgtgctttgttgtaatccactttcgattcgatcaaaacacgaataccggaagcaccgatgacaccataaagcagcagcgaaacgccgcccatcaccggcaatgggatcatctggatagcggcagccagtttaccgacgcaggaaagcaggatagcgaaaatcgccgccccgccgataacccaggtactgtaaacacgggtgatcgccatcacgccaatgttttctccgtaagtagtatttggcgtagagccaaagaagccggaaatcacggtcgacaagccattagcaaacatcgaacggtgcagacctggatcgcgcagcagatcttttttgacgatattagccgttactaccaggtgccctacgtgttcggcaataaccactaacgccgctggcagaatagtcagaatggcaaaccactcgaagcgcggcgtatagagggttggcagcgcaaaccagtgagcattaataatcggcgtggtatcgacaattcccattgcgaaagagagcgcgtaccccaccagcacgccaattaaaatcgggataattgccaggaaaccacgaaacagcacggaacctaaaaccgtgaccgccagggtggtaatagagatgatgatggttttggagtctggcgtttgcccttcagccgggagtaaacccgccataccggcagctacgcccgccagctccagaccgatgacggcaacgattgcgcccattgccgcaggtggaaacagcacgtccagccagccggtccccgctttcttcacgataaaagaaaccaggcagaacagcacgccgcacataataaagccgcccagcgcgacttcataccctaacggcaacagtaacaataccggtgaaataaaggcaaagctggaaccaagataagccggaattttccctttacagatgaagagatacagcagcgttccaataccgttaaataacagtacagtcgccgggttaatatgaaataagacgggcaccaggacggttgcaccaaacatggcgaacaaatgttgcaaactaagcgggattgtctgtaaaagtggcggtctttcactcaccccgatagcacggcgcgtcatagtattatcctctgtattatgtgttataggcgctttactcaaaaaaaaagccgactcttaaagtcggctttaattatttttattctttatttcgtaccaaagattttgtcaccggcatcgccgaggcccggaataatgtatccgtgctcgttcagtccctgatcaatcgatgcggtatacagttcgacgtccgggtgcgctttttccagcgcagcgataccttctggcgcagctaccagcaccagaactttgatgctgctgcagcccgcttttttcagcaggtcgatggtcgcgataacggaaccaccggttgccagcattgggtcaacgatcagcgccatacgctcatcgatgttagaaaccagtttctggaagtacggtaccggctccagcgtttcttcattacggtacataccgacaacgctgatgcgcgcgctcggaacgttttccagcacaccgtccatcataccaagacccgcacgcagaattggcacaacggtaattttcttacctttgatctggtcgatttctaccgggccgttccagccttcgatagttactttttccgtttcgaggtcggcggtcgcttcgtaagtcagcaggctacccacttcggaagcgagttcgcgaaagcgcttggtgctgatatcttgctcacgcatcagtcccagcttgtgtttgacgagtgggtgtttgacttccacgatcttcatactctttctcctttgaggggcagccacaaaaaaaatcgacggattatacctcctttcttcaaggcggcaatattcttttcgttgactttagtcaaaatgataacggtttgagataaagttattttatattcagatggttatgaaagaagattattccatccgaaaactaacctttaccctggcacaagtcttctttcgccgcgcgcctggggaaaagacgtgcaaaaaggttgtgtaaagcagtctcgcaaacgtttgctttccctgttagaattgcgccgaattttatttttctaccgcaagtaacgcgtggggacccaagcagtgaccgataaaacctctcttagctacaaagatgccggtgttgatattgacgcgggtaatgctctggttggaagaatcaaaggcgtagtgaagaaaacgcgtcgtccggaagtgatgggcggtctgggcggcttcggtgcgctgtgtgcattgccgcaaaaatatcgtgaacccgtgctggtttctggcactgacggcgtaggtaccaagctgcgtctggcaatggacttaaaacgtcacgacaccattggtattgatctggtcgccatgtgcgttaatgacctggtggtgcaaggtgcagagccgctgtttttcctcgactattacgcaaccggaaaactggatgttgataccgcttcagcggtgatcagcggcattgcggaaggttgtctgcaatcaggctgttcactggtgggtggcgaaacggcagaaatgccggggatgtatcacggtgaggattacgatgtcgcgggtttctgcgttggcgtggtagaaaaatcagaaatcatcgacggctctaaagtcagcgacggcgatgtgctgattgcactcggttccagcggtccacactcgaacggctattcgctggtgcgcaaaattcttgaagtcagcggttgtgatccgcaaaccaccgaacttgatggtaagccattagccgatcatctgctggcaccgacccgcatttacgtgaagtcagtgctggagttgattgaaaaggtcgatgtgcatgccattgcgcacctgaccggcggcggcttctgggaaaacattccgcgcgtattgccagataatactcaggcagtgattgatgaatcttcctggcagtggccggaagtgttcaactggctgcaaacggcaggtaacgttgagcaccatgaaatgtatcgcaccttcaactgcggcgtcgggatgattattgccctgcctgctccggaagtggacaaagccctcgccctgctcaatgccaacggtgaaaacgcgtggaaaatcggtatcatcaaagcctctgattccgaacaacgcgtggttatcgaataatgaatattgtggtgcttatttccggcaacggaagtaatttacaggcaattattgacgcctgtaaaaccaacaaaattaaaggcaccgtacgggcagttttcagcaataaggccgacgcgttcggccttgaacgcgcccgccaggcgggtattgcaacgcatacgctcatcgccagcgcgtttgacagtcgtgaagcctatgaccgggagttgattcatgaaatcgacatgtacgcacccgatgtggtcgtgctggctggttttatgcgcattctcagcccggcgtttgtctcccactatgccgggcgtttgctgaacattcacccttctctgctgccgaaatatcccggattacacacccatcgtcaggcgctggaaaatggcgatgaagagcacggtacatcggtgcatttcgtcaccgatgaactggacggtggcccggttattttacaggcgaaagtcccggtatttgctggtgattcggaagatgacatcaccgcccgcgtgcaaacccaggaacacgccatttatccactggtgattagctggtttgccgatggtcgtctgaaaatgcacgaaaacgccgcgtggctggatggtcaacgtctgccgccgcagggctacgctgccgacgagtaatacccccgtaattaaagcgccagctctgccgctggcgtttttcaattcacctgtaaatcgcaagctccagcagtttttttcccccttttctggcatagttggacatctgccaatattgctcgccataatatccaggcagtgtcccgtgaataaaacggagtaaaagtggtaatgggtcaggaaaagctatacatcgaaaaagagctcagttggttatcgttcaatgaacgcgtgcttcaggaagcggcggacaaatctaacccgctgattgaaaggatgcgtttcctggggatctattccaataaccttgatgagttctataaagtccgcttcgctgaactgaagcgacgcatcattattagcgaagaacaaggctccaactctcattcccgccatttactgggcaaaattcagtcccgggtgctgaaagccgatcaggaattcgacggcctctacaacgagctattgctggagatggcgcgcaaccagatcttcctgattaatgaacgccagctctccgtcaatcaacaaaactggctgcgtcattattttaagcagtatctgcgtcagcacattacgccgattttaatcaatcctgacactgacttagtgcagttcctgaaagatgattacacctatctggcggtggaaattatccgtggcgataccatccgttacgcgctgctggagatcccatcagataaagtgccgcgctttgtgaatttaccgccagaagcgccgcgtcgacgcaagccgatgattcttctggataacattctgcgttactgccttgatgatattttcaaaggcttctttgattatgacgcgctgaatgcctattcaatgaagatgacccgcgatgccgaatacgatttagtgcatgagatggaagccagcctgatggagttgatgtcttccagtctcaagcagcgtttaactgctgagccggtgcgttttgtttatcagcgcgatatgcccaatgcgctggttgaagtgttacgcgaaaaactgactatttcccgctacgactccatcgtccccggcggtcgttatcataattttaaagactttattaatttccccaatgtcggcaaagccaatctggtgaacaaaccactgccgcgtttacgccatatttggtttgataaagcccagttccgcaatggttttgatgccattcgcgaacgcgatgtgttgctctattatccttatcacacctttgagcatgtgctggaactgctgcgtcaggcttcgttcgacccgagcgtactggcgattaaaattaacatttaccgcgtggcgaaagattcacgcatcatcgactcgatgatccacgccgcacataacggtaagaaagtcaccgtggtggttgagttacaggcgcgtttcgacgaagaagccaacattcactgggcgaagcgcctgaccgaagcaggcgtgcacgttatcttctctgcgccggggctgaaaattcacgccaaactgttcctgatttcacgtaaagaaaacggtgaagtggtgcgttatgcacacatcgggaccgggaactttaacgaaaaaaccgcgcgtctttatactgactattcgttgctgaccgccgatgcgcgcatcaccaacgaagtacggcgggtatttaactttattgaaaacccataccgtccggtgacatttgattatttaatggtatcgccgcaaaactcccgccgcctattgtatgaaatggtggaccgcgagatcgccaacgcgcagcaagggctgcccagtggtatcaccctgaagctaaataaccttgtcgataaaggcctggttgatcgtctgtatgcggcctccagctccggcgtaccggttaatctgctggttcgcggaatgtgttcgctgatccccaatctggaaggcattagcgacaacattcgtgccatcagtattgttgaccgttaccttgaacatgaccgggtttatatttttgaaaatggcggcgataaaaaggtctacctttcttccgccgactggatgacgcgcaatattgattatcgtattgaagtggcgacgccgctgctcgatccgcgcctgaagcagcgggtactggacatcatcgacatattgttcagcgatacggtcaaagcacgttatatcgataaagaactcagtaatcgctacgttccccgcggcaatcgccgcaaagtacgggcgcagttggcgatttatgactacatcaaatcactcgaacaacctgaataaccctatgccaatacacgataaatcccctcgtccgcaggagtttgctgcggtcgatcttggttcaaacagttttcacatggtcatagcccgtgtggtagatggtgccatgcagattattggccgcctgaaacagcgggtgcatctggcggacggcctggggccagataatatgttgagtgaagaggcaatgacgcgcggtttaaactgtctgtcgctgtttgccgaacggctacaagggttttctcctgccagcgtctgtatagttggtacccatacgctgcgtcaggcgctgaacgccactgactttctgaaacgcgcggaaaaggtcattccctacccgattgaaattatttccggtaatgaagaagcccgtctgatttttatgggcgtggaacatacccaaccggaaaaaggtcgcaaactggttattgatattggcggcggatctacggaactggtgattggtgaaaatttcgaacctattctcgttgaaagccgccggatgggttgtgtcagctttgcccagctttattttcctggcggggtcatcaataaagagaattttcagcgcgctcgcatggcggcagcacaaaaactggaaactttaacctggcaattccgtattcagggctggaacgttgcaatgggcgcttccggtaccataaaagccgcccatgaagtgttaatggaaatgggcgagaaagacgggataattaccccggaacgtctggaaaaactggtaaaagaagttttacgtcaccgtaatttcgcatcgctgagtttaccgggtctttccgaagagcggaaaacagtcttcgttccgggactggcgattttatgcggtgtgtttgatgctttagccatccgtgaactgcgcctttctgacggggcgttacgcgaaggcgtactgtatgaaatggaaggacgtttccgtcatcaggatgtgcgtagtcgcaccgccagcagcctcgccaaccagtatcacatcgacagcgaacaggcccgacgggtgctggataccactatgcaaatgtacgaacagtggcgggaacagcaaccgaagctggcgcatccgcaactggaggcgctactgcgatgggccgccatgctgcatgaggtcgggttgaatatcaaccacagcggtttgcatcgccactccgcttatattctgcaaaacagtgacttgccgggttttaatcaggaacagcagctgatgatggcgacactggtgcgctatcaccgtaaagcgattaagctcgacgatctgccgcgctttaccttgtttaagaagaaacagttcctgccactgatacagctattgcgccttggcgtattactcaacaatcaacgtcaggcaaccaccacaccgccaacattgacgctgattactgatgacagtcactggacactgcgtttcccgcatgactggtttagtcagaatgcgctggtactgcttgatctggaaaaggagcaagaatactgggaaggcgtggctggctggcggttgaaaattgaagaagaaagtacaccagaaatcgccgcttaatactttgcgggccgacgagaaatgtcggcccgcattattcaggcactttcgcgaatgggttcgatttcattcagcgtatcaattaacggctgcggcttaccaataagataaccctgcatataatcgatccccaaagagagcaccgcctcgcggatctcttcgttttcaacgtactctgccactaccagcattttcttcattcgcgccaggtggcaaatcgatgccactatctgataatccagactatttgacacaatattgcggataaaactgccgtcaattttaagcagatcggcattcacatttttaagccgcgcatagctggcgtagccggtgccgaaatcatcaatcgcaatctggcagcctaattcctgaagatgctgcaaggtgatttgcgcctgcttaacattggtcagagcattactttcggtgacttcaaaaataagttgccacgcttcaatctgatatttagccagcaactgactgacttcaagaggaaaacgagcctgacataccgaggttggagacagattaatagcaaaacggtgagcgggcatcttcgctctgttttcagccataaattgcagcgtatgctcaatgacccacatgtcgatactcgacgataaaccaaattcgtgcgcgaccggcaagaagctatcggggctgatcagttcatcattctcacctttcatgcgcagaagaatttcatggtaaacatcaccacgcataccggtaatcggctgggccatcaggaaaaaatggttgtgttccagcgcctgctgtagtcgattcatcatcgcgactttatctttcaattcgcgttgcaaatacattgccccgcgacgctgcatattttccggggcgttggtcacgatggaaagttcggcgaccgtatttagctctcccagcagcaggtagatatgattcactggcgagcgcacatagcagtaactgacgccaatctgcggttgcatcggcatgccatcccaaaagaaacgaaattgcttgagatggctatccagtgcggtaatgcgctcctggtgcgattctgtattcagtcgcagcgcgagatcgttacccgaaagctgataaacatcttcacccggttccagcaagggtgacagccagtgagaaagtttttgcttgtattgaatccgcagcatgatgccatagttcttaaccagcatttccatgccagggatgcgtaaataacaaagcgcagaccagggggcatcacgcaacgcgcgattcagggcgcgaacatttggcagatgaaccaccgggtccacatacgcaagccgctgaatgcgtctgactaccgctctctgacgggttgccagtacagccatataattgacaataaaagagaataccagataactggaggaggttatggtcagctgcgtggtatagccaggataaatgggaatgtaattttgatagctgtggatgctgatcatcaacacgaccgcccagagcagcgaaatcagcttataaccatagcgcatcgctccccacatcatcaggggcagcaataatgacaaggtataattggtgctaaaaattgtgcttttttcatttaacggcatgcataacagcaacaataaagcacctaatgccagtagccagagcgcgaactcttttttggtgactttggcatcaacctgctgttttaattgcgaataatagctacgtaaataaaatggatttcgcactacccgaatgatgaagtagcacagcgggacaccgatcagattacccaccagtaaggcctgataattgattaaagtcccgaggttaaaaggcatgacaccgaccagattttctctgctcgccagtaatcctacaaatgcagcaaactggaaaagtatcagaaacagcgttgcaggaaacacaatctgccagaatatacgctgggaaattaaacgggtatcaccatgtgaaacgttgttacgccggggagtaaagaccctgtaaccgccccaacagagaatgataatgataataaaattagccgttaatgatagcgtttcgtaaaaacccagctctgcatatttgcggacaaaaatccctaaggcgatccctggcaatgccgcccagctgaaaaacatcatcatgctgatcatcagtgccagaggcagataaaagagaaaaacctcaccggaagaaatatgcgcgaaagtattaatgtgggcgaaaatgggcaagattaaagaaggcaggaacagcggaagcccccaccatttatcacgtatttttatataagttgcattcagtttcatagatgctcagcagaatcccccacatcctgaaggaggtgtattcagacaggcatcccacctgacttcgaatgatgattattcatcactatagagagcattgattctaagtgtcatatgaaagtaccaattgatatatatcaaacaaaataaccctgattaatgaattattacgtttatcatgttaattcatcattattacatcatcattgtaaataattaaattaacttccataacattaaaatatgtatccactgacgcttttttacataacgaagaattgaccattttgtcctgttgtgccttaatgtaagtaccgtccacagcgtgggacatacttcaaggaaccttttgtgagtcaggcaaccagtatgcgaaaacgacaccgatttaacagtcgcatgacccgtatcgtactgctcatcagctttatcttcttctttggccgttttatctactcgtccgtcggtgcctggcagcaccatcagagcaaaaaagaagctcagcaatccacactctccgtcgaatcaccggtacaacgttagcggttaccttctccactttcacagaacataacggcacttcgctgtcggatgcttttgctgtttgggattatcaaagcggcagatattctttcatcttaaattttacgtctttatcctgactgatgtttatcctgtttggctgcgaaataaatataaaattaatatatatgttgtaatgatatatttttataaattattccctgcgtgaattttaataaatttaatctatccctttatacgcaatacatttactttcctcttttgatgatcttaaatgtcttatttttcgtaatgtgtataacaaggaatagtgatgaaatttaaaaaatgtcttctgcctgtggcaatgttagcgtcattcactctggcaggatgccagtcaaatgctgacgatcatgctgccgatgtttatcaaaccgatcaactgaataccaaacaagaaactaaaaccgttaatattatttccattcttcccgcaaaagttgccgtagacaactcccaaaataaacggaacgcacaagccttcggcgcgcttattggcgcagtcgctggcggtgttatcggccacaacgtcgggtctggcagcaattccggaacgacggcaggtgcagttggcggcggagctgtaggcgcggcagcgggttctatggtgaatgataaaaccttagtggaaggtgtttctttaacctataaggaaggcaccaaagtgtatacctctacccaggtgggtaaagagtgccagtttacgacaggtttagccgttgttattaccacgacgtataacgaaacgcgtattcagccaaataccaaatgtcctgaaaagagctaataatcaggaggagtcatgaagaaagtttttctttgcgccatcttagcctccttaagctatccggctatcgcctcatcattgcaggatcaactctctgctgtcgcagaagcggaacagcaaggtaaaaatgaagagcaaaggcagcatgacgaatgggtcgcggagcgcaacagggaaatccagcaagagaagcaacgtcgcgcaaatgcccaggccgccgctaacaaaagagcggcaacggcagcggcaaataagaaagctcgtcaggataaactggacgccgaagcctctgcggacaaaaaacgcgatcaaagttatgaagatgagctacgcagcttagagattcagaaacaaaaactggcgctggcgaaagaagaagcccgcgttaagcgagaaaacgaatttatcgatcaggaactgaagcacaaagctgcgcaaaccgatgtggtgcaatctgaagctgacgccaacagaaatatgactgaaggcggtcgcgatctgatgaaaagcgtgggcaaagcagaagagaacaaatcggacagctggtttaattaatcgatgttagtaacttcaatcctataattcttgaagataaaaaaccctctgtagtaacagagggttttgttcattcatagtgcagggtcaaatcattcccactcaatggtagctggcggcttgccgctgatgtcatacaccacgcgggaaataccgttcacttcattgataatgcggttggaaacgcgaccgaggaaatcgtacggcagatgcgcccagtgtgcggtcataaagtcgatggtttcgacagcacgcagagagacaacccagtcatacttacgaccatcgcccattacgccaacggaacgtaccggcaggaacacagtgaacgcctggctgactttgtcgtacaggtccgctttacgcagttcttcaatgaagatggcgtcagcacggcgcagcaggtcacagtactctttcttcacttcacccagaacacgaacgccaaggcctggtcccgggaacgggtgacggtacagcatgtcgtacggcaggcccagctccagaccaatcttacgcacttcgtctttgaacagctctttcagcggttcaaccaggcccatcttcatctctttcggcaggccgcccacgttgtggtgagatttgatgacgtgtgctttaccggttgcagacgccgcagattcgataacgtcagggtagatggtgccctgcgccagccacttcacgtcttccagtttcagcgcttcttcatcgaatacttcaacgaaaacgcgaccgatgattttacgttttgcttccggatcgttttcgccagccagcgctgacaggaagcgatcttctgccggtacgtgaacaatgttaagaccaaagtgatcgccaaacatatccagaacctgctctgcttcgttgaggcgcagcaggccgttgtcgacgaatacgcaagtcaggtttttaccgatagcgcggtgcagcagcattgcggttacggaggaatccacaccaccagagaggccgaggatgactttatcgtcgcctacctgctcgcggatgcgagctacagcatcgtcgataattttcgctggcgtccacagggcttcacactggcagatatcacgcacaaaacgctccagcatgcgcataccctggcgggtgtgagtcacttccgggtggaactgtacgccatagaagcgtttttcttcgttagccataatggcaaacgggcagctttcggtgctggctacggtgatgaagtcggacggaatagcggtaactttatcgccgtggctcatccagacatcgagcagcggtttaccgtctgcggtcagcgcatcttcgataccgcgaaccagtgcgctgtcgtttacgacttcaacctgcgcgtagccaaattcacgttcgttagaggcttcaacgtgaccgcccaactgcattgccatggtctgcatgccatagcaaacgccgaataccggtacgcctgcttcaaagacatactgcggcgcacgcggactgttttcttcagtagtactttccgggccgccggaaagaataatgccgcttggattgaagtcacgaatttgtgcttctgtcacatcccacgcccacagttcgcagtaaacacccagctcacgcacgcggcgcgcaaccagttgagtgtactgagaaccgaagtccagaatgaggatgcgatgcttatgaatgttttccgtcattgacgcttattccgaggcaagtgaaacagataatataaatcgcccgacatgaagtcgggcgaagagaatcaggagcccagacggtagttcggggactctttagtaatggtcacgtcgtgaacgtggctttcctgaatgcccgcaccgctgatacgtacaaactccgctttagtacgcagttcgtcgatagtaccacagccggtcagacccatacaggagcgcaggccgcccatctgctggtgaatgatctctttcaggcgacctttataggctacgcgaccttcgataccttccggcaccagtttgtcggcagcgttatcgctctggaaataacggtcagaggaacctttggacatcgcgcccagggaacccataccacggtaagatttgtaagaacggccctggtagagttcgatttcacccggagattcttcagtacccgccagcatggaacctaccatcaccgcgcttgcgccagcggcgatagctttggcgatgtcgccggagaagcgaataccgccatcagcgataaccggaataccggtgccttccagggcttctactgcgtcagcaacagcggtaatctgcggaacaccgacgccagtcacgatacgagttgtacagatagagccagggccaatgccgactttaaccgcactgcaaccagcttctgccagagcgcgtgcacctgcagctgttgccacgttgccgccgataatttgcagatccggatatttagcacgggtttcacggatacgttgcagtacaccttctgagtgaccgtgggaggagtcgatcagcagaacgtcaacgcctgcggcaaccagcgcgtcaacacgctcttcgttacccgcacctgcgccaaccgctgcaccaacacgcagacggccttgctcgtctttacaggcgttcggtttacgttccgctttctggaagtctttcacggtgatcatgccgatcaggtggaattcgtcatcaaccaccagcgctttttcaacgcgtttttcgtgcatttttgccagcaccacttcacgggcttcaccttcacgcacggtgaccagacgctctttcggcgtcatgtaaacgctaaccggctggttcaggtcggtaacaaaacgcacgtcacgaccggtgataatacccaccagttcgttttcttcggtaacgaccggatagcccgcaaaaccgttacgctcggtcagttctttcacttcgcgcagcgtcgtggttggcagaacagtctgcggatcagtcaccacaccagattcgtgttttttcacacggcgaacttcttctgcctggcgttcaatggacatgtttttgtggataaagccgataccgccttcctgagccagagcaatagccaggcgcgcttccgttacggtatccattgctgcggaaagcatagggatattcagacgaatagttttcgtcagctgggtgctgaggtcagcagtattcggcagaacggtagagtgagcaggaacgaggagaacgtcgtcaaacgtcagagcttctttagcgatacgtagcatgggcaatatctcgaccagagtggttaataaatattgccgcggcattatacagagcgtaaccgattgcatctacccctttttgcaaaaaatgcttgctatccccgaagggcgggttactatcgactgaataacctgctgatttagaatttgatctcgctcacatgttaccttctcaatcccctgcaatttttaccgttagtcgcctgaatcaaacggttcgtctgctgcttgagcatgagatgggacaggtttggatcagcggcgaaatttctaatttcacgcaaccagcttccggtcactggtactttacactcaaagacgacaccgcccaggtacgctgcgcgatgttccgcaacagcaaccgccgggtgaccttccgcccacagcatgggcaacaagttttagttcgcgccaatattacgctctacgagccgcgcggcgactaccagataatcgttgagagtatgcagccggccggtgaagggctgctgcaacagaagtacgaacagctcaaagcgaagttgcaggctgaaggtttgttcgatcagcaatacaaaaaaccacttccctcccctgcgcattgcgttggtgtgatcacctcaaaaaccggtgctgcgctacatgatattttgcatgtgttaaaacgtcgcgatccttctctgccggtgatcatctaccctgccgccgttcagggcgatgacgcgccggggcaaattgttcgcgccattgaactggcgaatcagcgcaatgagtgcgacgtattgatcgtcgggcgcggcggcggttcgctggaagatttatggagttttaacgacgaacgcgtagcgcgggcgatttttaccagccgcattccggttgtcagcgccgtcgggcatgagacggatgtgaccattgccgattttgttgccgatctgcgtgcgccaacgccgtctgccgccgctgaagtagtgagccgtaatcagcaagagttactgcgccaggtgcaatcgacccgtcaacggctggagatggcgatggattattatctcgccaaccgcacacgtcgctttacgcaaattcatcaccgattacagcaacagcatccgcagctccggctggcacgccagcaaaccatgcttgagcgcctgcaaaagcgaatgagctttgcgctggaaaatcaacttaagcgtaccgggcaacagcagcagcggttaacacaacggctgaatcagcaaaatccacagccgaagattcatcgcgcgcaaacgcgcattcagcaactggaatatcgtttagcagaaaccctgcgcgcacagcttagcgccacgcgtgaacgtttcggtaatgcagtaacgcacctcgaagccgtaagcccactgtcaacgctggcgcgtggatacagcgttactactgctactgacggcaatgtactgaaaaaagtgaagcaagttaaagcgggtgaaatgctaaccacacgtctggaagacggctggatagaaagtgaagtaaaaaacatccagccagtaaaaaaatcgcgtaaaaaggtgcattaagccagcacgaattcaacgcgttttttcgatatcaagccatgcccgtgctgacagaagtaatctactgcaccacaggcttttaacacctgcaacggttgatggcagtctggacaaagagctttcatttcaataaattccccgcaggatcggcaacgcgcatggccgttatcctgatcaagcacatgctgacattgtggacaatgcagttccatatgaattcctccggtagccattccctctacattcatagagggaatggcagataaaatacttacggataattatttatttttcttgatgtgcttcatcagacgcttacgtttacgcatctgggttggcgtcagggtgttacgcttattcgcatacgggttttccccttctttgaactgaatacgaatcggcgatcccattacgtccagcgatttgcggaagtagttcatcaagtagcgcttgtaggaatcaggcaggtctttcacctgattaccgtgaatcaccacaatcggcgggttataaccaccggcgtgggcatatttcagcttcacacgacgaccgcgtaccagcggcggttggtgatcttcaacagccatcgtcatgatgcgcgtcagcatagaggtccccacacgacgggtggagctgtcatacgcttcacgtactgattcaaacaagttaccaacaccactgccgtgcaaggcagagataaagtgcacacgagcaaaatcgataaagcccagacggaagtccagcgtttctttcacctgctctttcacttcctgactcaggccatcccacttattcaccacaatgacaagtgagcgcccactattgagaataaagcccagcagcgagagatcctgatcggaaataccttcgcgcgcatcaatcactaacatcaccacgttggcgtcttcaatggcctgcaacgttttgattacggagaatttctctacagcatcggtgattttgccgcgtttacgtacgccagcggtgtcaatgagcacatactcacgtccatcgcgttccattgggatgtagatgctgtcacgcgtcgtgccaggcatgtcgtaaacaacaacgcgctcttcaccaagaatacggttagtgagtgtagacttacctacgttcggacgacccacaatcgccagtttgatcggcagactttgcgggtcgaagtcgtcttcctcttcttcttcgccgttctcttccgcttcaaattgcgcccagtattcagcgtcttcgtcgacttcctcttgcggtgcgagatcttccatccacggcagcagcacatgctccagcagacttaatacgccacgaccgtgagacgcggcgatcgggtagatttcacctaaaccaagcgagtagaaatcaaccactgcctgatcgggatccagaccgtcagttttgtttgccaccaggaaggtcggtttttcacgggagcgcagatgtttggcaatcgcttcatctgccggcatcaggcccgcgcgcgcatccaccataaacagtacgacgtccgcttcttcaatcgccagcagcgactgttccgccatgcgggtttctacaccgtcttctgtgccatcaatcccgccggtatcaatacagataaactcacggccttcaatttccgcacgaccgtacttacggtcacgagtcagacccgggaaatccgcaaccagcgcatctcgggtgcgagttagacggttaaataacgtggattttcctacgttagggcgcccgacaagcgcgaccacaggtaccatgtttaaagcctcatttttataaatcatcagacaacgcacgctatattcgcgtcgttgttaaaaacaggaaaacggcccctgtccaggagccgttttcaaagtgaacgacagagacgattaacgtgtaatagagtacacggttccgtcttttgcctggatcagcagtttgccgtcagcggcaaccggttcagtctggaaaccggaactatcaactttttgctgggcaacgaaacgaccatcttcgacgttaatccagtgcagataaccttcactgtcaccgaccaccaggttgccattatacagcaccggagaagtcagcaggcgatgcagcagatcgctttgtgtccacagcgtaacgccgccatcaatggtcaacgccatcacccggtcattttgatcgaccagatagatgcgattgccgtcgacgatgaaatcattcaccgaacccagttcgcgtttccacataatctgaccactgcgcagatcaagcgccgtcaggttaccattataggccagcgcgaaaacaacgccgttaacaacgacgggagtcgtgtcaacatcgctcagacggtcaatttcggtagaaccggtcgcctgggaaatacgctgctgccaaatcatctggccctgttccatcagcactgcgctgacgcgaccattatcgccccccacgacggccgcaccaaaagccgttgccggcgcagactcgccacgcaaagagagcgaaggcatatcgaggttaactgtccatttgacagcgccgtcagcttcgttcagcgcttgtaactgaccgttactggtgtggattaacaccagaccgtcgctgaccaccgggcgcgaaagtgcttcacccgcgactttagtttgccatgccacagtaccatcgctggtattcagcgcgtaaacctgcgccttttcgctgccaatgtagacatgcccaccagacacggtcacaccgccagaaagtaatgcaggctctttagagaaccagccatctttctcggccaggctgacagaccagatttctttgccatcatccgcattcagcgcttttactaaaccagcgcggtccgctgcatagacaacgttgtccgccagtgccggatgaagattggaatagaagttgccaatgccgctaccaacggaagtgctccacgccgtggtcggcgtaaactggttttcaacggttggcaatggggacatctttaccacatcttcttcgctgttaaacagcgaacagccgcttaaaagggtaacggaaagcagtcctggcagcagtaatttacgcaattgcatcgggtccctctcagatggacaaattattaattttcatctgcatcatttcgctcagtgccggagtaacatcgcttttcacgcctgcttcccatgcactacgcgcaccttgcttatcacctttgctcagcaatgcttcaccacgcaggtcggcaacaatggcagcccacccttcacctttgatggtatcaagggttttcagcgcggcatcagcctgcttgagctgtacctgaacgcgagcaagacgcagatttatcacggctttgagattttcatcgctcgtgtctgccagcccctgttgtaactgggcggcagctttctctagttcatttttgtcaacaaattgctgcgcaagttccaaagaagccagcgcaccataagtatttttattttcagcagcaaatttttccgccgccgggatgctatccggtttgccttcgctcactgcggtaaccgcattttgataggcaagagaagcggagcgtgcagaatcaacctgatggctgttccagtagcgccagccaatcagtgcgccaacgcccaaaatcaccccaacagccagtgctttgccattttcagcaaaaaagcgtttaaccgcttctacctggtcgttttcgttctcgtaaatttccacgctgtccttctccttccttaacccagtaacgtgcgcaaatgcgcggctacgctatcctgcgcaactgccgtttgctcaccagagcgcaaatccttcactactgctgtgccgttagccacttcagactcacccagcaccacagcaacgcgggcaccccatttatcagcacgggcaaactgtttcttaaagttgccgccgccgtggttggtcatcaatttcacgcccggtaattcatcacgcagacgctcagctaatgccatagccgcagattgtgtatcagcacctgaagccaccaggtatatatcgacaacaggatcggctttaaattccggattaacggcctgtactaacaatacaagacgttcgaggcccatcgcaaaaccgacagccggtgttgcacgaccgcccagttgttccacaagaccgtcataacgaccgcctgcacacacggtgccctgggagccgagactgttagtcacccactcgaaaacggtacggttgtagtaatccagaccacgcaccagacgctggtttacggtgtaagcgatccccgcgctctccagcagtttgcacagaccggcaaaatgctcacgagattcctcgtccagatagtcacctaatgccggagcgtcgttgagaagcgcctgcacttccggattttttgaatccagcacgcgcagcgggttagtgtacatgcggcgtttgcagtcttcgtccagcttttctttatgctgctcaaggaatgccaccagcgcatcgcggtaattggcgcgtgcttccagcgaaccgatagagttcagctcaagagttacgtgctcggaaatacccagcgcgcgccaccagcgggcagtgagcataatcagttcagcgtcgatatccggaccttgcagaccgaaaacttcgcagcccaactgatggaactgacgataacgccctttctgcggacgctcgtgacggaacatcggcccgatataccacagacgctgttcctgattgtacagaagaccatgctcgatgccggcgcgtacacagcccgccgtcccttcagggcgcagagtcaggctgtcgccattgcgatcctcaaaggtgtacatctctttttcaaccacgtcggtgacttcaccaatcgcacgtttgaatagcggggtctgctctacaatcggcaagcggatttcactgtaaccgtagctgccgagcacgtttttcagtgtgccttcaatgcgctgccagatggccgtttcgccaggcaggtaatcgttcatgccgcgaatggcttgaatgttttttgccacgtttattctctttctgaatataaaaatgaaccctcaacgcttccctcaatgtttcgggagccatgcgggttcaatcatacacgggaagcgaggcgcttcccatcacgttattatttttcaacctgctgaacgtcaattcgacgcgcttcgtccagctgactggctttcgcacgaatgcgtgcttccagctggtcgatcatatcgttgttgtccagacggtctttgcgcacgccatcttcatagaggccgcttttcttgttgccgccggtgacgccgagtgtagaaaccagcgcctcacctgggccattcaccacgcagccgataatcgaaacgtccatcggagtgatgatatcttccaggcgttgctccagcgcgttaaccgtaccgataacatcaaattcctgacgcgaacaggtcgggcaggcgatgaagttgatccctcgcgaacggatacgcagcgatttcaaaatatcgaaaccgactttgatctcttcgaccggatcggccgccagcgatacgcgcagcgtgtcgccgatgccttcagacagcagcagacctaaaccaatggcggattttactgccccgctgcgcgcaccaccggcttcggtgatccccagatgcaacggctgatcgatctgttttgccagcaaacgataagactcaacagcgaggaagacgtcagacgctttcacgctgactttgaactgatcgaagttcaggcgatcgagatgatcaacatgacgcatggcagattccagcaacgcctgcggcgtcggttcgccatacttttcttgcagatctttttccagcgatccggcgttaacgccaatacggatcggaatgtttttatcgcgcgcacagtcaaccaccatgcgaatacgctcttcattaccgatattgccagggttaatacgcagacaatcgacgccgtattccgctactttcagcgcaatgcgatagtcgaagtggatgtcagccaccagcggcacgttaacctgctgtttgatgagtttgaacgcttctgccgcgtccatcgtcggtacggatacacggacgatatcagcgccaacgcgttccagcgccttgatttgattgaccgttgcttcgacgtctgtcgtacgcgtattggtcatggactgtacggcgatgggagcaccatcgccaatcggcacattcccaacgtaaatacgtgttgattttctacgttgaattggagcctggttatgcatgaaaaatctcccgcgttacccgtctgttactgcgccggtgattgttcggcattgagggtcagacgcgcaacctggttagttctgataaaacgactcagatcgacaggtttcccttgatactggatctgtactgcggctggcgcaccaattttcagtttgtacggtgcctggccggttaagttcaaattaccgtctttacgctgcataccgctaaacaattttttaccggtagcatcagtgacctccagccagcaatcggcagtaaagttcatcaccagcgcattcggatcagccaccggcgtggtcacgccagcctgatcggttggcaacggcgcagcaccatctggcgttgttgctgccgttggtgccggggtcgcggcggtatcaacatttgcctgcgaaggcgaaacaaccgcattctgttgcggatcaacagctggtgctggcgcagttacggcaggtgtttgcgtgttggttgcggtagtatccacagacgctggcggcgtggacgttgtagccgggtctgtagttgtcgacgtatttaatggaacactctgcccctgctcgctattactgctcagttccgccgaagattgatcggccatagtggtgatctcttcctgctgagctttgtggtcttgccaccaccaggcaccgctcaggccgataaccacaaacaacaccagccaagtgaaggtcatcagccagccgtcgcgttttttgcggcgtttaccgagggaaaaactctgcatcggcgcaacttttgcagcccgaagtggagcctgcttttccagccctggcagcagttcttcttctggaatatgtaccagacgcgcataagagcggatatatccgcgcaggaatgttgaagcaagatcggcgggtgccttatcttcttcaatgtcgcgtaccgtggaaaccttcaggcaaagtcgctcggcaacggcctgctgactaagtcctagttgttcgcgagcattacgcaggcgagcgccggtagtaagtgcttcattttggtcgtgcgtggcttcagtattcattcgctgcaggtacgtttaaatgagaattgagatgccggtgaaccatcatgctcacccacaccgcgaaacatccgttaagttaaccgttatcatacagtataagaccgtctgtgtgctcgtgacaaagcccacattcactaaggctaacttactgttgcatcgttacatactgccttaaagtcagcaaaaacgcaccgttaatattgaccagacaattgcaacttaatacttcattcataaaacattacgccacggtacataaagtaaccgtggcgtaatggctatcagaccgctttaatgtcgatggcttcaccctgcatccgtttacgcagggtacgtttcgtacggtcgataacatcgcccgccaactgaccacaggcagcatcgatatcatcaccacgagttttacgcacaatagtggtgaaaccgtagctcatcagcacttttgagaaacggtcgatacggctgttcgagctgcgtccatacggcgcacccgggaacgggttccacgggatcaggttgatcttacacggcgtatctttcagcagttccgccagttggtgcgcgtgttcagtgccgtcgttaacgtggtcaagcatcacgtattcaatagtgactcggccctgattggcgttggatttctccagataacggcgcaccgcagcaaggaacgtttcgatattgtactttttgttgatcggcacaatttcgtcacgaatttcgtcgttcggcgcgtgcagggaaattgccagtgcaacgtcgatcatatcgcccagtttatccagcgccggaactacaccggaagtggaaagcgtgacgcgacgtttagacaggccaaaaccgaaatcatcaagcatgatttccatcgccggaacgacgttgttcaggttgagcagcggctcgcccatgcccatcatcactacgttagtgatcggacgctgaccggtgacttttgctgcgccgacgattttcgccgcacgccacacctggccgataatttccgacacccgcaggttgcggttaaagccctgctgggcggtggaacagaatttacactccagcgcacaccccacctgcgaagagacgcagagcgtggcacggtcgtcttccgggatatacaccgtttcgacgcgctgatcgccaacggcgatcgcccatttaatggtgccgtcagatgaacgctgttcttcaaccacttccggtgcgcggatttccgccacctctttcagtttgccgcgcaacactttgttgatgtcggtcatctcatcaaagttgtcgcagcaatagtgatacatccacttcatcacctgatcggcgcggaagggtttttcacctaaatctttaaaaaactcccgcatctgctgacggttgagatccagcaggttgatttttccatctttcgtggtgacgttttcaggtgtgactaattgttcagacatatgctattccggcctcgttattacacgttatggcccctggagggttgaaaaaagaaacgccccggtgagcggctgctcgtccgggggcgctgcattgtacaaattctggcgcacggatgccacgtttgcacgcggcatttacgaaattattaacgggtgcgcgggcacacttcgccttcgccaaagaaataagcgatttcgcgagcggcagattcgacggaatcagaaccgtgggtaccgttttcggtcaggctgtcagcgtaatcagcgcgcagagtaccagccagtgcgtttgccggattggtcgcgcccagcagatcgcggtgacgctgaacggcgttttcaccttccagcacggaaaccacgatcgggccagaggtcatgaattcaaccagaccatcaaagaacggttttccatcgtgttcagcataaaagccacgtgcctgttcaacggtcaggtgcagcattttggtgccaacaattttgaaccctgcagcttcaaagcgcgcaaagatattaccaatgacgttttttgctaccgcgttcggtttgatgatggaaaaagtacgttcaatagccatttttacctctgtaaattgttctgttgttgtctgtaccagcgtacgagatggcgcggattataatgagcaacagggccgttgactattgatgaaggtaacatttttttaaaataaaatgagttttagcaacaatcagggacaaaacagactattgcatgacaaatttcactgtcgcgatttgccccacgtcatccatcaccagcaattgataatcacctttatccgtcaaatgcagggtcacgttgcgcccgcgttcagttaacggttcgccattcagaaaccaccagcgttcacctgcccctccacttgattgcaacggcaaagtcgcttccgctgcgcccggtaaacgtttaataatcgcgccatcgcgaacgcctgtcagctgcagcgggagctgggcatcgtgaccgtatggcgggcaacttgtcgaggccggtggtaagcgcacagcgcgacgttctgatgcgggcagccagggttccagcggtagcggccagacatttatcatttcttgtcgcgcttgcgggcaatcagcggcaacacgtttgccattttcatccagccagatggggaaacgaatgccattaatgccttcctgctccggcagtaatagagttggcggctgactcccgtccagcagccaggttgccaggcggcggcgacagttaccgtcaccttccggcaaagactgtccgcccggccagcagataacgccacgagtgactgagttcgggcgcgggtcttccggcagattcgcactgcgcgacagtaagatattattgacctgattcaacaatggtacggcactggcaaagccaaactgaccaacaacgggcgtgccgtccggtctgccagtccagatcccaatgacatagcgagcgttaaccccaatcgcccaggcgtcacgatagccatagctggtgcccgttttccatgccagtggggcgacgcgcggcaaggcactatccggcaagggttgcgcttcatcagccataatccggcgaatgatccacgccgcccccgacgacattaaaggccgttcaagcagcggatcgtcaggctgtaagcgcaatttgcctgccttgccgtggcgagcaaacgcggtatacgctgccgccatatcttccagttttgcaccagcgccgccgagaatgagtgaaagattcggcgcagcaccgttgggcaaatataacggcaatccaacattgcgtaactttgccgcaaaccgtttcggtccataggcttccagcacctgcacagcaggtaagttcagcgagcgcaccagcgcctcgctcatgctgatcgggccatgaaaaccgctatcaaagttacctggtcgataatcaccggtgcgccgggggacgtcttgcagcagtgatgccgggtggatcaagccttcatccagcgccagaccataaacaaacggtttgagcactgatcctggcgatcggatcgaattgaccatatcaacatgaccaaagcgtgaatcatcgttgagatcaaccgatcccacccagccgcgaacacgcatatcggtatgatcaaccacgatcatcgccagtgagctgcgcggtggcaaccgccctttccagttttgcgccagttcttccagacgtcgttgaagaccggcatccaacgtagtagtgattttgtcgcttttgcttttaccgagcatcatgcgcgaaaacagcggtgccaattgcggcatttgtcggggggccagccagatgggttcttcccttgactcttttacctgctcacgggaccacacaccttgcacggccatccgttcgagcactttattacgcgcggcttcggcacgctccggccaacgatccgggcgaagacggctgggcgcttgcggcaaaaccgccagcattgccgcctcggaatagcttaaattcgcaggcgattttccgagataagcccaacttgccgcaccgatcccctgcaacgtaccgccaaacggagcgcggttaagatacaaggtcagaatttcacgcttagacagatgccattccagttgcaacgcgcgccagagctggcgaattttgccgccaaatgttttggggtgaggatcaagcagacgagcaacctgcatagtgagcgtgctgccaccggaaataacccgtcccgaagtgagatcttgccatgctgcgcgcgccaccgagaatggattcacccccggatgcttccagaaccagcgatcttcataattgatcagcgcttcaaggtaacgtggagaaacatcttcgattgttaccggataacgccagatgccgtcagcatcggcgaagcgccagagcggcgtaccatcctgcgccacgaccactcgtgcgggattgacttcatgcagcggtagaggccagagtttatctgctccccacgctgcaagaaaaaggagaaagggcgcggctgccaacgttatccagcagccgcgtttggttaacaagcgaggcatttacggtctgacaatcagcagatcttcagccgcgccggtcgcccgccattggggaacatacattgattccaccatcggttgcggtacctgatacgttcccggcgtcaccgcccgcgccagatacaccagcgttaccggttggtattcatcaacggcaaccgccgccacaaagcgatcgtcacggaactcaatgtgcttaatgctcgcctgctgcatctggttcagtaagttctgcacttcgccaccactttgctccaggctggcgctaccgttcgccagattctggttttccagttccagacccgcaggcagcagatccacgactaacgcatccggcacgctgttactggcttttacctgcaaccacaccagcaccagatcgccgctacgtaacgagtccagcgatttgctcttaccatcagtaccaagaatatgacgctcgatttgcagcacattgttcgccggtaaaggtgcggattgcggataaccgctggcatccatacgcaaccataacggctgatcgccactgttgctcacctgcaaggtgacaagttgatcgctattcagattgctgttttgcgctttctcgcctgtcagctgctcagctgagaaagaggtttgcgcctgccatttaccgggtaaatcctgaatcgtacgggcagccaggaacaacgcgttactttcctgcgtcgatagccagcgttcaccaaacgcctgctgcgaaagtgtgttcagcaaagtgtactgctcatcgggtagcagtttattttcttccagcaaggagagcattaacgcgttgtcgcgcagtgaactaccgtaatcacccagccatatccgctcatcactattacgcggcgttttcagcgccagcgcaatcgcttcttcaccacgcgtcgcatcacccatggttttcagcgcaacgccaagttgcagcagcggtaaaccagaagcggcatctgcacgatgctcccagatttcacgcagcgcacccagcggagccttttgctgacgggccaacaccagcgcagcgtaagactgtacggcgaatttactggctttgagattatccgcgtacgggatcgacatcatgcccggatcttgtaaatagcgcagcagacgctcattaccccggttaatggcgtctgtcggcacgctgtaaccctgttcgcctgcgcggaccaggaaatccatcacgtaagccgtcagccagtactcttcgtcaccgtttttatcccacagcgcaaagccgccgttatcacgttgcatttgcagcaaacgggaaatgccgatatcgaccgatgcacggcgtttctcatcactgtcgcctttgatgcccaacgcctgcagttgggctgcgttggtataaagtgacggaaacaggccgctggcggtttgctcaagacagccgtacggatacgcttttaactctttgatataacgtgcgatgttcagcggtggtttgccgctcaacaacaattgcccttccagcgtaacaggcgagaagttttgcaatccatccgccggaatcgcccatgtctcaccaggctgtaacgccgtaccgtaattaaccgtttgtgccgggaacgccggacggacgccgattttccactgcttatgctgatcggcaacggtttcacccggtaacgctaacccgctaatggtggcctgaatttctccatcgccataacccggcaatgctcgcaccgggataaacagcgtagtacgcacacctggcgctaattcaacggctgcgggtgaatcgctgaccagttcaagcaaaccactggcggtcagggcaacgttcagtttttgcggtttatcggtaagattagtgatatccagcgtcagacgcgaggtatcgccactcgccataaagcgcggcatgttcagttcagcaatcaccggtgcggcaactatcactttactttcgttgctaccgaagtcatctgccgtccaggcttgcgccatgacgcgcaattcaccgttaaaatcgccaatcggcagtgtaaccgagccttcgccctgttcgttgagcgttaccggcagcgcctgctgcacgacaatattgacgtgattgaccggcggtttaccaccacgtttcagctcatcaccatcgccaccgaaacgcagagctgccagacgcccctgaccttcaataacctgaccgtaaatatcgtaaatgtctgcgccatagcgtttctgaccaaagaacgcctgccacggatctggcgtgacgtagtcagtaatattcagcacaccactatcaacggcagacaccagcacattcacctgtttaggcttctcgccatttttagtgctggctttaattttcacggttaatggttgattgggacgcatttttgctggtgtttccagcgccagatcgaggcgacggttttcatcgccaagcggcagatgcaacacaccaaccgcgcgttttggcgtcgcggagcgagatttatcgccaggacgtaccaccagcgtacttaaatacagatcatgacgattccaggttttatcgaccggaatcgtcagatccagcccttgagcccgaacatcaatctcttgccaccacagcggcccttcactggactcgaccatcgcataacctttacccgccgttggcgcggcgatatgcaacttaatggtgtcgccagggcgataactggctttatccagtttcagcgtgacacggtcgggtcgcactgcgccgctaccgtcgctgttgtcctgccagctatagccagcccagaaacgaacactactgaccgcttcattcggcgctttgacttccagacgataagcgccccactctaccggaaaactgaccttgccggtttcgtccgctttcagatccagagtttgttcattttcgatcagatctttttgatcaaactgtgactgccagccttcatcttctgaccagttccagtagtaatcgcggcgttcgcgaatcaggcgcacctgcaagcccgacacggcttttttcacgccttgcgcatcgctataaacgatgtcaaaagcggcgttactgccttcatcgacaatgggctgtttcaccgtgctgtcagtacgataatcgtaaaccgatttcgaggcgaactgcggacggatccccggcaatgcatcggcaggccagatagcctgctcagcgcggcgcgtcaccgggcgaccgcccgattccagcaaactaccctggaaaataacctgtaatggggaatgcgtttccttccactggctttctgtagaaacttcgccgcgccctttatcatccagcgtcaactgaacttcatccagcgtgcgggaaagattttcggcagctatatcgccgaattcaaaaccaggtaaggctgacacagcttcacgcagtgggcgcaggaaaagttgcccttgcaaagtattaccattagcaggtgcaccatacaggtagtaccccaccacggagaatttcacttcatctttcggcgttagcggggttttctcaccggtcagattcagcgccatgcgctctggcataaaatcttcgacgtggaaatcccacatccgatactgattatcgcccgtgttagcgcgaatatgccacataccggttgccgcattgctatcgagtggccaggtaaagtggtagaggccattctccggctgactaacgacgctcctgagtacctgcccatcgggtttaatcacgtctaacttgatgggttgattgggcaacgctttaccgtctgcatcacgcagcaaaccattgaggattaccgtttcacctgggcgataaagatcgcgtgggccaaacatgaaaaactgtttgctatagcctggcgcgccagcaatgttaaattctgctaagtccagcgccggaagttttaaatcgagtagcgttgtctgaccgtctttacgcgccaacagtaatgccgcgtttttatcattttccagctgcacatgcccctgagcgtcactggttgcctgagtcagagtctgccctttctcatttaataaagagacttcaattccttgctgggccgcgccgttttccagactttgggtaaagatatccagacgattgtgataacggtgagctgaaacgccgatatcacttaacgtaaacagcgtcgcgggattactgtaatcgtaacgtccagcctgattcatcacagccagatacacgcccgcctgctgaagcggtttgatatcgcccagcggcagcaataatttttcacgggtgttacgcgcaggattgagatcaaaccgtccggtgtagaccagatccgccatctgcagcagtttgtctgactgccagttcgccagcgaattgcggtattcccattggctaatgaatgctggcagagattctggcttaacgcggaagaagttaacatcgacattattaacgttgagcgccattaccggcagcccttcaacgactttgccaggcagcagcgaaccacggctggcaaaaccgacgctgggttggatgtcgcgggtagttatagttttttcgtaatctttactgaaggttgcgttgttgagtgctttgacctccttgccaatagtaacgatcaaatcacgtttcggttcgaggtggcgtaaacgtaactctttaagattatctgacagctcccaggcaccatccactttgccgctttttttatcgacgacatgaataacgcgtgagaaatcctgatccgggtcgagagggatggagaacgtcagcaccagcgtggctgcaccatcaagttggacttcagagagatccagcaatgtcagcaccttaccggcactctgttgggccagtttttgtctctccggcacggagagttttgctgaactcgcgttttctgaagaggccgctttagtaacttcagaaggcgcatcttttttcaccgctgttggcgcgttatcgttgttgtcgcaccctgccagcgccagcattagcatgcaggcggctacgcgtaactttttcatttttcatccctgccacaatggcccgttagcaacgtcgaataattattatgcgtgagaatttacgttatgtaattcagtatcacgcccatacaatccgaattttagtgagaattgtggctcagacagccaaatcagcctcttttgcttgtcgcttttcactaaacatccgacaatttagcctaaccccggcaaaaatggagatgcctatgtccacgacatggtttgtaggagccgactggctcgccgaacatattgatgacccggaaattcagattatcgatgcccgcatggcgtcgcctggacaggaggatcgtaacgttgctcaggagtatctgaatggacatattcccggcgcagtgttttttgatatcgaagcgctttctgatcacacttccccgcttccgcacatgctgccgcgcccggaaacgttcgccgtggcgatgcgtgaattaggcgttaaccaggataagcacctgattgtctatgacgaaggtaatcttttctcagccccacgagcatggtggatgctgcgcacctttggtgtagagaaagtgtcgattctggggggtggacttgcaggctggcagcgcgatgatctgctgttagaagaaggtgcagtagagctgccggaaggagagtttaacgccgcgtttaatcctgaagccgtggtgaaagtaaccgatgtattattggcaagccatgaaaatacggcgcaaattattgatgcccgcccggctgcacgttttaacgcagaagttgatgaacctcgcccaggtttacgtcgcggacatattcccggagcactgaatgttccgtggacggaactggtgcgcgaaggcgaactaaaaacgaccgatgaactggatgcgatattttttggtcgcggcgtcagctacgacaaaccaattatcgtcagctgcggctctggtgtaacggcagccgtggttttgttagcactcgcgacgctggatgtgccaaacgtgaaactgtacgacggcgcatggagtgaatggggcgcgcgggcagatttaccggttgagccagtgaaataagtattttacaggcaataaaaaaccgccgaatttggcggtttttattgctagtctggttcgcggcctttccagcaggttgacttgtgttacatgagcaacgcaggtgcttcacagcaaaacaatactcaccagtaactctctttttgtcaagcaaaagagagtaattattgtttatttagcgtattatcgacaccggccctttccgccgtgttcggtaataaaataacctggcttattagtccgaattcagacaaatataaacaaatcctgctcaaaattaaaaattctaaccggtaaaagatattacttaaacatgtaaattcactttcctttaaaaaacaaaaaaccgccaaaatcaggcggttttttgttgctggtccggttcgcggcctttccagcaggttgtattaccgtagtaatgcaagcgcgtctcagcggagacaatactcgccagtaactctctttttgtcaagcaaaagagagttattattgttctgttagtgtattatccactgcggccctttccgccgtctcgcaaacgggcgctggctttaggaaaggatgttccgtggccgtaaatgcaggtgtttcacagcgcttgctatcgcggcaatatcgccagtggtgctgtcgtgatgcggtcttcgcatggaccgcacaatgaagatacggtgcttttgtatcgtacttattgtttctggtgcgctgttaaccgaggtaaataataaccggagtctctccggcgacaatttactggtggttaacaaccttcagagcagcaagtaagcccgaatgccgccctttgggcggcatattttagattatccgattctgtttaaagtcacgcaaaaaaccaccccagcgacgttcatagaatggcgcaatatgttcggtaataaagtggctaattcctttttccccttttttcacctgacaaatatcgattggttcatcgccaggtaatgtatcggtcgctacacttcccgtcgcctgaataatttcttcgatatcaccatcggcttcaatgccaataagtaaattaggctgtgcctcttcgttctctttaattgaacaaataaaagcacgcttcaccggcttaatggttttaaataaggtggtgagtgaatcaatcatttgtgctggcggctctgcgacttccgataatatcagcgattcaccgccttccaggatttcctggctgctcagcggatttccctcttcaccaatcaacaaactgatttcacgcggcataaattctttaccggttggcagtttggcattaaggaagagcgtttcgccaagtgtcatctcaaacagcgtgcgaacgggcattacgacaaatgcctgttcgtcttcaaccgcctgttgaagtgcttctaacgaggtgaaaaaaggaatgacgctggtgccgtcttctttttcccagtgctgtaaatcaagcgcgctatcttcaaccacagcctcgccctgcgccgccgtaccaggcacccagacggtggattccagtagagtacggaaaaaggccgggcggtgcgccggttcagttgctgctttttccagcaggtcttcaagttcgttttttgtttcggacataagaaccacaattcattcaacgttcggggcgcaaatgcctgatgcgctacgcttatcaggcctacaagggattcgcaatttgttgaatttgcagaatttgtaggccggataaggcgtttacgccgcatccggcatattagtttacgccgttaacagattagctatcgtgcgcacaccaagtcccgtagcgcccgcagaccactgttcaaccggcgctttacggtaagtcgccgagcagtcgatatgcagccagccttgctgatagttctcaacaaagtgcgacaggaagcccgccgccgtgctcgcgcctgccggatacgccgcgcttccggtattgttcagttcggcaaagttagacggcagctggctgcggtggaactccgccagcggcagacgccagaacggttcgttctcctgcgcggcactcgccagcaagcgaccggccagcgcatcgtcaaaactgaacagcgcgtgataatcattacccagcgcagttttcgccgccccggtgagggtcgccgcatcaatgatcatttccggtttctgcgcactggcatcaatcagaccatcggcaagcaccagacgcccttcggcatcagtgttcatcacttcaacttttttaccgttgcgataggtgatgatatcgcccagcttgaacgcattgccgctaatcaggttatccgcacagcagaggaacagcttcacgcgcttgttcagtccgcgcgtaatggcaaatgccagcgccccggtaaccgttgccgcgccgcccatgtccgacttcatcgagtccataaacgcagtctgtttgatgctgtagccgccggagtcaaaagtgatacctttacctaccaggcacgcgtacactggcgcttctttatcgccagttgggttgtaatccagcgccagcaataccggagaacgttctgaaccgcgtccgactgtgtgcagccccatataaccttgctcacgcagatcttcgcctttggtgatccgataagtcacacgatcgcccgcgacgttgctgatcagatcaacagcacgctgtgccagttgcgatggtcccaattcttctgccggtgcgttgatggtgtcacgcacccagtcgatgatcatcaggcggttatccagttcctggcgctgggcatcgtccagatccggccacaccactttacgcgtgcctttcggggctttgtaaccttgccagaatgcccagcagcgatccgcatcccagccttcaccgcttaactgaacatgcttgatgcccagaccgtcaatcttgcgcgccgcacgctggatcagccccagatcgtctgccccgttcaaatgcagggtaatgccgtcattattaatgctgtaagttgctttttctccccagcgcgcgtcggcaggttgggtagagagggtaatcttcatcgcttctgtcattttagttatccttctttgtaaaagggccgccagttggcagccccaggatttttccgctaaatgattcgcgttgcaggaaggcggcaagtgagtgaagccccaggagcatagataactatgtgactggggtgaacgagcgcagccaacgcatctgcggcgtgaagcatgacgcggaaattattcggcctcgtccagccagactaacaaaatcgcttcgaggattttctcgttggatgcctgcgggtcgtcgtcgaaatcttccagatcgcaaatccactgatgcatatcggtgaatcgaaccgttttcggatcaagatcgggatacgcatcgtacagtgcttcgccaatttcgcggctatcggtccacttaagtcccatactaacctctgttaatgctcacgcgcatggttgatagtgtaacgcgggatttcgactactaaatcttcgtcggtaacgcgcgcctggcagcttaaacggctttccggctccagtccccaggctttgtccagcatgtcgtcttcctgctctgagctttccggcagtgagtcaaaaccttcacgaacgatgcagtggcaggtggtgcaagcacaggatttttcacaggcgtgttcaatctcgataccgttacgcagagctgcgtcgagaatggtttcaccgctattagcttccagaacagcgccatcagggcagagatcctgatgaggcaaaataacaatctttggcatattaaacctcgtccacggaatggcctttcagcgcacgacgaaccgactggtccatgcggcgagcggcgaaatcctgggtttgtttgtctacgtttttaatcgcttgttcgatggcgtcaacatcatcgccctgcgccacttcactcaggtgagcggcagcatcgtcaatgacctgacgttctgcggcgcttaacagcgcggcatcagcagccagcgcgccgtgcagactttccagcacacgcgccgcttctactttttgttctgccagcattcgggcttttacgtcctgctcggcatagctcattgagtctttgatcatcgaagcgatttcgctatcggtcagaccgtaagacggtttgacctgaatagacgcctcaacgccggtggatttctccatcgccgtcacgctcaaaagaccgtcggcatcgacctggaacgtcacgcgaatatgcgcaccgccagccggtagcgccggaataccacgcagcgcaaaacgcgccagtgagcggcagtcctgcaccagttcgcgctcaccctgcattacatggatagacatcgccgtctgaccatctttaaaggtggtgaaatcctgagcgcgggccaccggaatagtggtattacgcggaatcactttctccaccaggccgcccatcgtttcgaggcccagcgacagtgggatcacatcaagcaacagcatttcgctgtctggcttgttacccaccagaatatccgcctgaatcgccgcgccaatagcgacgactttatccgggtcgatggaagtcagcggtggacgaccgaaaaattcgcctacccgttcacgcaccagcggcacgcgagtagaaccgcccaccatcaccacttccagcacttcatcagcttctacacccgcgtctttcagcgcgcgacgacaagccagtaaggttcgttttaccagtggcgcgatcagttcattgaattgttcacggctgatttcgccctgccagcccgcaacgttaacggtcacggagtccgcatcgctcagcgcgattttggctgcaatggcggcatccagcagttcacgctgaacgcggttatcgctacgatcaggaatgcccgcctgctcgcgaatgtaatccgccagcagatggtcgaaatcatcgccgccgagcgcggaatcaccgccggttgccagcacttcaaacacgccgcgacttaagcgcagaatggaaatatcaaacgtcccgccaccgaggtcataaacggcgatcacgccttcctgaccggaatccagcccgtaggcgatagccgcagcggtcggttcgttaagtaagcgcaggacgtgaaggcccgccagacgcgccgcgtctttggtgccctgacgctgggcatcgtcaaagtacgccggaacggtgataactacaccatccagctcgcctgccagggcttcagttgcccgcgccgccagtgctttgaggatgtccgcagaaacgcgcaccgggttcagcagccccgccgccgtttcaatcatcggcaggccgttttcgctggcctggaattgataaggcagatgcggatagcgttgctggatatcagccagcgagcgtcccatcaggcgtttaacagaactaattgtgttggcggtatcgagcgctgcattagtacgcgcgtcataacccaccgaatgcccttgctgttgatagtgaacaacagatggcagcaggtgacggccttcatgatcggctaacgtttcggcctgaccgctgcgcactgtcgccaccagcgagttggttgtgcccaggtcaataccggccgccagacgacgctgatgcggcgcagcactcaaaccaggttcactaatttgtaataaggccatgtttagcttccagaaattaaaaatcgagcagtttttcttcgagttgttcggcactgcttcgcagtttatcgagaaaacgcagcttacgcacggtatccgccgccgcgtcccacgtctcgttgtctaactgttcaaccatcaactgatggcgggtatcaaacatctttttcacacgtttgataaagctttccagccgcgcttcatctttcgcctgttcgatctcgtccagctcttcgcgcagctccaactgttccatcaggaacgcggtgtcgcgcacagtatgctgctcgctggcgagatcaaagccgtgcaaagaaagcaaatattccgcgcgcattaacggatgacgcagcgtttgccaggcctggttaatggttgcagattgctgtacggcggcgagttgttccgcctggcttccgctggcgaatttatcaggatgatactgacgttgtagatcctgaaaacgcaggctcagcgcctgggtatcgagttgatagcgggcaggcaagccaaagagggtgaagtaatccataacattctcagggctgcgatccgccgcgataacggcgaatcaggtaaaacaaaccccacgcgcaggcgaccacggtggggttatcggtatgcgcatcaaacgtggaagctttcgccgcaaccacactcatctttgacgttcgggttggtgaatttaaacccttcgttcaggccttcttttacgaagtccagctgcgtaccgtccagaaattgcaggctcttgccatcgaccacgactttcacgcctttgtcttcaaacacgatgtcttccggcgtcggttcgtcaacaaattccagtacataagccatacctgaacacccggaggttctcacgcccagacgcaggccaaaccctttaccgcggttagccagaaaggtatttactcgcgctgctgcactgtcgctcagtgtaatcgacataaccaaacctcaactcttattttgcttcacgtttgcttttatagtccgcaatggcggctttgatcgcgtcttctgccagaatagaacagtgaattttcaccggcggcagttcaagttcttcagcaatatcggtgtttttgatcgcctgcgcttcgtcgagagacttccctttcacccattcggtgaccagggagctggaagcgatagcggaaccgcagccgtaagttttaaaacgcgcgtcttcaatgataccttcatcgttgactttaatctgcaacttcatcacgtcgccacaggccggtgcccccaccatgccgctgccgacgttctcgtcgttgttgtcaaaggaacccacgttacgcggattctcgtaatggtcgataactttttcgctgtaagccattataaattctcctgattccgataccgattaatgatgagcccattcgatgctgttcagatccacgccctgcttgtacatttcccacagcggagaaaggtcacgcagacgaccgatggatttacgaactaactcgatggtgtagtcgatctcttcttcagtagtaaaacgacctaaagagaaacggatagagctatgtgccagctcgtcgttcagccccagcgcgcgcagcacgtaggacggttcgaggcttgctgacgtacaggcggaacctgaagaaactgcgaggtctttcagcgccataatcagcgactcaccttcaacgtagttgaagctgacgttgagaatgttcggcgcaccgtgttccaggtcaccgttcaggtaaacttcttcgatatctttgatgccgttccacagacggttacgcaggccgcgcagacgttccatctcggtcgccatctcttcttttgcgatgcgataggcctcgcccattccgacgatctggtgaacaggcagagtgccggaacgcataccgcgctcgtgaccgccgccgtgcatttgcgcttcgatgcgtacgcgcggtttacggcgtacatacagcgcaccgatacctttcgggccatagattttgtgaccggagaaagacatcaggtcaactttcaactggctcaggtcgataggcagtttacccacgctctgggttgcatcaacgtgatagataatgccacgagcacggcacatttcgccgatagccgcgatatcctgcaccacgccgatttcgttatttacgtgcatgatggacacgaggatggtgtcgtcacgcatcgctgcttcaagttctttcaggtcgataatgccgttacgctgcggtgccaggtaggtgacttcaaaaccttcgcgctccagctgacggcaggtatccagtaccgctttgtgttcggttttgctggtgatgatgtgcttgccttttttctgataaaagttggctgcacctttgatcgccaggttgtcagattcggttgcaccagaggtaaagacgatttcacgcggatcagcgccgaccagatcggcaatctgattacgggcgatatctaccgcttcttcagcctgccagccgaaacggtgagaacgggaggccgggttaccaaaggttccgtccatcgtcataaactgcatcattttctcggcaacacgcgggtccaccggcgtggttgcggagtagtcgagataaatcggtaatttcattgctctataaactccgtacatcactcaatgcaaggaatcaggctaccggctggatgtacgaccgtgtttacggagtatttagcactccggcctgattctgaattctttttattaagcgcgtaacttaacgtcgatcgcgtcttgtgtgcgggtgcgtggcgcgtcgtgagtatgctgacgaccagacacatccagcacttcctggttattaaccagttcgcctaaagtaatgttgttgagaaaaccggtgagacggtcgctcaaatcacgccacagcgcgtgggtcaggcatttatcgccgccctggcagccgcctttaccctgacaacgggtggcatctacagattcgtcaacggcgctaattacttcgccaacggcgatgctgctggcatctttgcctaacagataaccaccgcctggtccacgtacgctggaaaccagaccatttttacgcagacgggaaaacagttgttccagataagaaagggaaattccctgacgttcggaaatatcagccaacggtaccgggcccgcttcagagttgagcgcaacgtcaagcattgcggtcacggcatagcgccctttagatgtcagtctcatgtcttacttcacctcaaactcgcccctgcccggggttttttattgtaaaagtgggggtattgcatagcagggtcaagtctgacattcccgagtaaattggtcaactatttacttgactgatttagtcgggtatttaaccttcagtgccatttttttatcgtggcgtttgtacctgttgtcggatgcggcgtgaacgccatatccgccctggggttctgtacactgtaggcctgataagacgcattacgcgtcgcatcaggcaacggctgtcggatgcggcgtgaacgccttatccgacctacggttctgttcactgtaggcctgataagacgcattacgcgtcgcatcaggcaacggctgttattcggccttgttacctttattctgctgctcaatagaagccagaatcccgcgcaggatattcaactcctggctttccgggcgcgcacgggtaaacagacggcgcaatttattcatcacctgccccggatggttttcacggataaaaccggttgccagcagcgtttgttccagatgaccataaaaacgctccagatcatcgaccagcggatacggcgtctcttcatgctcgacctgctcgccgttttcctgagttgccagccaggccatgcgcacttcataggcaataacctgaaccgccatcgccaggttcagcgagctgtattccgggttagccgcaatcgcgacatgataatggcatttctgcaactcttcattggtcaagccgacgcgctcgcgaccaaacaccagcgccaccggggtatttgccgcttcagcgacgcttttcaggccgcattcgcgcgggtcgagcatcggccatggcagcgtgcgggaacgtgcgctggtgcccaccaccaggctacaaccggctaacgcttcgtcgagcgtatcgacgatgtgagcattaccaatcacatcgctggcccctgctgccagggcaatcgcctgggagtcgggtttcaccagtggattaaccagccacagattggttaatcccattgttttcatggcacgggcaacagaacccatattgccggtgtgtgacgtctccaccagcacaattcgaatattttgcagcattgtctttcttcatctaaagattattcacgcatcttatcataaaacgaagacagatgccgatctcgctgctatactctgcgccgttttcccgttctttaacatccagtgagagagaccgatgcatccgatgctgaacatcgccgtgcgcgcagcgcgcaaggcgggtaatttaattgccaaaaactatgaaaccccggacgctgtagaagcgagccagaaaggcagtaacgatttcgtgaccaacgtagataaagctgccgaagcggtgattatcgacacgattcgtaaatcttacccacagcacaccatcatcaccgaagaaagcggtgaacttgaaggtactgatcaggatgttcaatgggttatcgatccactggatggcactaccaactttatcaaacgtctgccgcacttcgcggtatctatcgctgttcgtatcaaaggccgcaccgaagttgctgtggtatacgatcctatgcgtaacgaactgttcaccgccactcgcggtcagggcgcacagctgaacggctaccgactgcgcggcagcaccgctcgcgatctcgacggtactattctggcgaccggcttcccgttcaaagcaaaacagtacgccactacctacatcaacatcgtcggcaaactgttcaacgaatgtgcagacttccgtcgtaccggttctgcggcgctggatctggcttacgtcgctgcgggtcgtgttgacggtttctttgaaatcggtctgcgcccgtgggacttcgccgcaggcgagctgctggttcgtgaagcgggcggcatcgtcagcgacttcaccggtggtcataactacatgctgaccggtaacatcgttgctggtaacccgcgcgttgttaaagccatgctggcgaacatgcgtgacgagttaagcgacgctctgaagcgttaatgactcaggcgggtgatatcactcacccgccctcgcctttcaggcgctattccgaaatacttcctcactgctttactttctttcgtcactctcccaccatctttccccgattaatggatgataaagaagtcgcaaggaaaggttatggcactgccagtgaacaaacgcgttcccaaaattctgtttattctctttgttgttgccttctgcgtttatttagtgccgcgcgttgccatcaacttcttctattatcccgacgataaaatttacggtcccgatccctggtcggcggaatccgtcgaatttacggctaaggacggtactcgtctgcaaggctggtttatcccttcttcgacgggccctgctgacaacgccatcgcaaccatcattcatgctcacggcaatgccggaaatatgtccgcccactggccgctggtcagttggttacccgagcgtaatttcaacgtttttatgtttgattatcgcgggtttggtaaatcaaaaggcacgccgtcccaggccggattgctggacgatacgcaaagtgccatcaatgtggtgcgccatcgcagtgatgtaaacccacaacgtctggtgctgttcgggcagagtattggcggggcgaatattctggatgttattggtcggggtgatcgtgaaggcatacgtgcggtgatcctcgactccacatttgcctcttatgcaaccatcgccaaccagatgatccccggcagtggctacttacttgatgagagttacagcggcgaaaattatatcgccagcgtcagcccgatcccgcttttactcattcacggtaaagctgatcacgttatcccatggcagcacagcgaaaagttgtatagcctggcaaaagagccaaaacggttgatcctaatcccggatggcgaacacattgatgctttttccgatcgtcacggcgatgtttatcgcgaacagatggtggactttatccttagcgcgttgaatccgcagaactaacccatgatcgctagcacgataatcattcacaaaaccaccttaagacatgctaatccactggtcagaacagtttaagatgagaaaaattctgtgacgcttgccaacatttctgatgattagcattcccttcgccatttccttgagcaaactttagctattcttatcaattatgcttatgggagatctacagatgatgcctacgcttgctccaccatctgtcctttcggctccccagcgccgctgccagatcttgctgacgctctttcagccggggttgaccgccaccatggcaaccttcagcgagcttaatggtgtggatgatgatattgccagtcttgatatcagcgaaacaggacgggagatcctgcgctatcatcaactcacactgacgactggttatgacggtagctaccgggttgaaggtacagtgcttaaccaacgtttgtgtttatttcactggctacgacgtggtttccgtctgtgtccgtcatttattaccagccaattcacccccgccctgaagagtgaactgaagcggcgcggaattgcgcgtaacttttacgacgataccaatctacaagcgttagtgaatctctgctcccgacggctgcaaaaacgctttgaatcgcgcgatattcatttcctgtgtctgtatctgcaatattgtttgctgcagcaccacgctggaattacgcctcagtttaatccgctccaacgtcgctgggcggaatcctgccttgaatttcaggtagcgcaggaaattggacgccactggcagcgtcgggcgctccagcctgtaccacctgatgagccactgtttatggcactacttttttccatgttgcgggttcccgatccattgcgggatgcgcatcagcgggacagacaattgcgtcagtctatcaaacgtctggtaaaccattttcgtgagctgggaaatgttcgtttttatgatgaacaggggttatgtgatcagctttatacccacctcgcccaggcgttaaatcgcagtttgtttgccatcggtattgataataccctgccggaagagttcgccagactgtacccacgcctggtgcgcaccacccgcgcggcgctggccggatttgaaagtgaatacggcgtccatctttctgatgaggaaagtggtctggtcgcggtgattttcggtgcctggctaatgcaggaaaacgatctgcatgaaaaacagattattcttcttaccgggaatgatagcgagcgagaagcgcagattgagcagcagttacgcgaactaacgttactgccgctcaacattaagcatatgtcggtaaaggcatttttgcagacaggcgctccgcgtggcgcggcactgattattgcgccttataccatgccattaccgctcttttcaccaccgctgatctatacggacctgacgctgacaacacatcaacaggagcagatccgcaaaatgctcgaatcagcatgagggaacaactttcgggcgcaaaaacattgccggaagcgccaccagcgccattacccagaacacgccgtggcccagatattgatacaggaaaccggcgaaaacggtcatgatagcgatactgccgcccatcgcgacggcagagtaaaccgcctgtaaacggatgacttcgctaccctggcgagcagcaatataacgcatggcggccaggtggcagaccgtgaaggtgccgcaatgcagaatttgcaccactatcaaccacggcaacgccgtagttgctcccataatgccccagcgcactacgccgcaaatcgccgagatcaacagcatatcgcgtgcactacaacggcggaaaagtttattactcagcgcaaagataatgacttccgccaccacgcccagcgaccacaaataccccaccgccgaggccgagtagccagctgcctgccagtaaatggcgctaaaaccgtaataggccgcatgtgccccctgcaataaacaaacgcaggccagaaagcgccagttctggcgaaccagcgccaaccacgcagaccaaccggtgctctcctgctggcgacttgccccttgtggctgaatcgtcggacggatgagaaagccgagcagcatggatgccacgcccaacgtcaacagcgcgaggatcacccgataatcaaacatagtgaccagtttgcccgtcagcgccgagccaatgacaaacgccaccgagccccacagtcgcactttgccgtaatcaagcgggaactgcttttgccacgtattcgccagtgcatcggtcaacggtaccagtggtgagaaaaagaggttaaagccaatcatcaccagcatcagccacgctacgtgcgcccccgcccagaaggcgacagcaaagagaagtgtcagcagtgccagcacgcgcaaggcggaaatcaggcgggaaggatcgctgacgcggggcgcgatgagcaaactcccgaggaaacgggcaaccagacctgcccccaataacaggccgatggtttctggcgttaaaccaatccctttaagccagacgctccagaaaggtagaaaaatgccgtaactaaaaaagtatgtgaaatagccgagcgccaaccagcgcgtggattgcaaaaccatgagtccctcccgtcaggaggcgttagtctggggttaatcgaatgttggtgcaagttgaaaaataagaatattcgagcctgcttcccgatgtctgtaacgccagttcacaagcactaaaaaactgagatccgcgacgcatgttgcaaaaataatgcgtaattatgccgttacgcttgccaaacgttcctgcacaatggcgatgaaatcgcgtaatgccggcttcatctcccctttcttccacgccatcagtaaagcaatggaaggcacatttccggcaatgggacgaaaaacaacctgtccggtattaaaattattcatataaccgggtatcaaagtgacgcccagccccatgcccaccagattcatggtcaccagaatattcgttgccacctggacgatatttggctggctgttttcttgcgcaaaccacgctttaacgatcggcgcaagcgaaccggaatacaccggatcggtactgacgaaattcacgccatccagttgcgcggcggtgatctctttttcatgtgctaaagggtgatcaaccggtaacacaaccactaatggttcgtcaaaaagctccagataatcaatctccgggctataaacaggatggcgcattaagccgacgtcgagttcaccacggcgaattttttcctcctgttgcgtggtgattaaactcaccagctcaatcaaggtgtctggctgtctgagacgaaacatcggtaatacttttggcagtaaattcacttccgccgatggcacaaagccaatggttaattgtctgtcttcctgaacaattttccgcgcccgtaatttggcattttccgcttgttcgaggattgccagcgcgtcctggagaaaacattctcccgccgccgtcaacgcgactttgcgcttatccctcaccagtaacggaacaccgacacagttttcaagatcgcggatctggctgcttaacgaaggctgtgaggtatgcagtttttccgccgcacgggtaaagttcagtgcctgcgccactgcgacgaaatagcgtaaatgccgtagttccatcaccttccccttgttatcgaaaaaacgtctcagctggtagaaattaactatttcacatattagcaaccaaccagcaacatccttatggcacaaaaatagaaggtcaatacatcttatctttcaggattaaaaaatatgaccacaccctcagatttgaacatttaccaactgattgacacccaaaatggtcgggtcactccgcgtatttataccgacccggatatttaccaactggagcttgagcgtattttcggtcgttgctggctatttctcgcccacgaaagccagatcccaaaacccggtgatttctttaacacctacatgggagaagatgcggttgtcgtagtgcgtcagaaagacggcagcatcaaggcgtttctcaaccaatgccgccaccgggccatgcgtgtgagttatgcagattgcggcaacactcgcgcctttacctgcccgtatcacggctggtcttatggcattaacggcgagttgatcgatgtaccgctggaacctcgcgcctacccacaagggttgtgtaaatcccactggggactaaacgaagttccttgtgtggagagttataaagggctaatttttggcaactgggataccagcgcaccgggcctgcgtgattacctgggtgacattgcctggtatctggatggcatgctggatcgtcgcgaaggcggcaccgaaattgtcggcggcgtacaaaagtgggtgatcaactgtaactggaaattcccggcagagcagttcgccagtgaccagtatcatgctctgttcagccatgcttctgccgttcaggtattaggggcgaaagatgatggcagcgataagcgcctcggtgatggacaaaccgcccgcccggtgtgggaaaccgccaaagatgcgctgcaatttggtcaggacggtcacggtagcggtttcttctttactgaaaaaccggatgctaatgtctgggtcgatggcgcagtttcaagctattaccgcgaaacctatgccgaagcagaacaacgtttaggtgaagttcgcgccctgcgcctggcgggtcataacaatattttccccacgctttcatggctaaacggcactgccacactccgcgtctggcatccgcgcggccctgatcaagttgaagtgtgggcgttctgtattactgacaaagccgcctccgatgaagttaaagccgcttttgaaaacagcgccactcgtgcttttggtcctgctggttttctcgagcaggatgactcggagaactggtgtgaaatccagaaattgcttaaaggccaccgcgcccgcaacagcaaactgtgtctggaaatggggcttggtcaggaaaagcgccgcgacgacggcattcctggcattactaactatatcttttcagaaactgccgctcgtggaatgtaccaacgctgggccgatcttctgagtagcgaaagctggcaggaagtgctcgataaaaccgccgcttaccagcaggaggtgatgaaatgagtgcgcaagtttcactagagttacatcaccgcattagccagtttctctttcacgaagccagcttactggacgactggaaatttcgtgactggctggcgcagctcgacgaagagattcgttacaccatgcgcaccacagttaacgcgcaaacacgcgaccgccgcaaaggcgtccagccaccgacaacctggatttttaatgacaccaaagaccagctggagcggcgaatcgcccgtctggaaacgggcatggcctgggcagaagagccgccgtcacgcacccgtcacttaatcagcaactgccagataagcgaaaccgacatcccaaacgtatttgctgtgcgggtaaattatctgctttatcgggcacaaaaagagcgcgatgaaacattctatgttggaacgcgtttcgacaaagttcgccgtctggaagatgacaactggcgcttgctggaacgggatatcgtcctggatcaagcggtaatcacttcccataacctgagtgtactgttctgatgaatcgaatttatgcgtgtcccgttgcggatgtgccggagggtgaggctctccggatcgatacctcgcccgtcatcgccctgttcaacgttggcggcgagttttatgccattaacgatcgttgcagccatggtaatgcgtcaatgtcagaagggtatctggaagatgacgccacggtggagtgcccgctacacgccgccagtttttgcctgaaaacggggaaagcgttatgcctgcccgccaccgatccgctcaccacttatccagtacacgttgaaggtggtgacattttcatcgacttaccggaggcgcagccatgagcgatctgcataacgagtccatttttattaccggcggcggatcgggattagggctggcgctggtcgagcgatttatcgaagaaggcgcgcaggttgccacgctggaactgtcggcggcaaaagtcgccagtctgcgtcagcgatttggcgaacatattctggcggtggaaggtaacgtgacctgttatgccgattatcaacgcgcggtcgatcagatcctgactcgttccggcaagctggattgttttatcggcaatgcaggcatctgggatcacaatgcctcactggttaatactcccgcagagacgctcgaaaccggcttccacgagctgtttaacgtcaatgttctcggttacctgctgggcgcaaaagcctgcgctccggcgttaatcgccagtgaaggcagcatgattttcacactgtcaaatgccgcctggtatcctggcggcggtggcccgctgtacaccgccagtaaacatgccgcaaccggacttattcgccaactggcttatgaactggcaccgaaagtgcgggtgaatggcgtcggcccgtgtggtatggccagcgacctgcgcggcccacaggcgctcgggcaaagtgaaacctcgataatgcagtctctgacgccggagaaaattgccgccattttaccgctgcaatttttcccgcaaccggcggattttacggggccgtatgtgatgttgacatcgcggcgcaataatcgcgcattaagcggtgtgatgatcaacgctgatgcgggtttagcgattcgcggcattcgccacgtagcggctgggctggatctttaaggaagcacgatgaaagaaaaaacgatcattattgtcggtggcgggcaagcggcggcaatggctgcggcctcgctacgccagcaagggttcaccggtgagctgcatctgttttccgatgagcgacatcttccttatgaacgacctccactctcgaaatccatgttgctggaagattccccgcagttacagcaggtgttacccgctaactggtggcaggaaaacaatgttcatctgcattccggtgtaaccatcaaaacgctgggtcgcgacacacgagagttagtgttaaccaacggcgaaagctggcactgggatcagctttttatagcaaccggcgcggcagctcgaccgctgccgttgcttgatgcactgggagaacgctgctttaccctacgccatgccggtgatgccgccagactgcgagaagttctgcagcccgaacggtcagtcgtgattatcggtgccggaactattggtctggaactggctgccagcgccacgcagcgcagatgtaaggtgacagtgattgaactggcggcaaccgtcatgggccgtaatgcaccaccgcccgtgcaacgctatcttttacagcgccaccagcaggctggtgtgcgcattctgctcaataatgccattgaacatgtggtcgatggtgaaaaagtagaactgacgctgcaaagtggggaaacgcttcaggctgatgtggtgatttacggtattggtatcagcgccaacgagcaactggctcgcgaggccaaccttgatactgccaatggcattgtcattgatgaggcttgccgcacctgcgatcccgcgatctttgccggtggcgatgtggcaatcactcgtcttgataatggtgcactacaccgctgcgaaagctgggaaaacgccaataaccaggcgcaaattgccgctgccgcaatgttagggctaccgctaccgctactgccgccgccgtggttctggagcgatcagtacagtgataacttacagtttattggcgatatgcgtggcgatgactggctttgtcgtggcaacccggaaactcagaaggcgatttggtttaatctgcaaaacggcgtgcttatcggtgcggtcacgctgaatcaggggcgtgagattcgcccaattcgcaaatggatccagagcggcaaaacgtttgatgcgaaactgctgatagatgagaacatcgcgcttaaatcactgtaaccaggataattagcgaatatctcaatgcctggggcgtggcgaggtgcaagagtgtgtattacgtttaaatcacattatcttgcaaagggattggttatgaacacactacgttattttgattttggagctgcccgccccgttttgttattaattgcccgtatcgccgtggtcttaattttcattatttttggttttcccaaaatgatgggctttgacggtacggtccaatatatggcctcgttgggcgcgccaatgccgatgctggcagcgattattgcggtagttatggaagtgcccgccgcgatattaatcgtgcttggctttttcacccgtccgctggcggtgctgtttattttctacacgctgggtacggcggtgattggtcaccattactgggatatgaccggcgatgcggttgggccaaatatgattaatttctggaagaatgtcagtatcgctggcgcgttcttgctattggcaattaccgggccgggggcaatttctctcgatcggcgttaggaaagatgccggatgcggcgtgaacgccttatccggcatttaataaattacagccactctacccgcaacgacatctctgaagttgttgattcccctggtgctagcgcaatgagatcacccccttccgggcgatgatgatcatccggcgcatggctcatcggttccagacagaagaaatcaaacgcatatcctttatcaaacgcagggtcggaaacaaagatgaaataacacggtgcaggtggcgtcgtttccatgatgatggcataaccttcctgcggctgctcgatgcgggcctgaccattccatccggcaaaaccattgttcacccactggcgcggcaacggcgcgggctggttaaaatccagttcctgcggtagctgctcgcaaaactcacccgccagccactgctcccgctccagccagtaaccgctcgcctgtgcctgaatccgcgtttgcggcgacaacggaaaataaggatgccagccggtaccaaatggcagcgtctctgccccttgattggtgacagagagcgtcaccgtcagcgtatccgccgttaaatgaaacgcctgacttacccgatagtgatagacaccgctgcgatgttcatacaccagacacaaactatcatcgctgtgcgagacacattgccactcgcccagccagccatcgccgtgtagatagtgcgcatcccactcaacattcggttgcagttgatactcacgcccctgccagacaaaacgattgccgctcacccggtttgcaaatggcaccagcggaaaacatgaggcatcggttgccacaccgctttttttaccaggacgtaagagcggcgtcgtatcgcgccagaagccttcgattacgccgccctggtcagaaacgtccagctttagcgacccgtgggataaggtatagatggtcatccgctaactccttaatccgggaagttaatcacaactttcccgcatttgccgctcgccatcagcgcataggcatcacctgcctgttccagcgagaagcgatgggtaatggcgttacgcggccacagcttccagtccgtcagatcatgggcgcatttttccatatggaacagactggtcacccaggagccgataatccgccgttgatggtgcatcagatcggcgctgacctcgaattccacttttccggtttcaccaatgtaaaccacccgtccccagtcagcggtggattgcagtgccagcaagcgacctgcggcattaccggaacaatcgagcgcaacatccgcgccaccgtgggtgagttcggcgataatctgcggcagaccttcggtggttgctaaatagccgtgatccatcacccctaactgttttgccatcgccagacgttccggcagcatatcaacgccgatgatccgttttgcaccgcgacctttcgccagcatcatcgccatcatgccgactggccccagaccgaccaccagcacgttatcactgccggaaacttcgccgcgcaaaattccttcatacgctgtaccaacgccgcaactgataaacgcaccatcttcgtagctcagcgcatccggtgtattgattcacaagaagtacgaaaaaaaccgggaggacattggattattcgggatttgacgggattagatttgatggggcttgcaagcctgtagagcagattttagccgttaagccttgaaacgcgaaagattgttagaaatggcttttgtttcattaaagatacgaaaagcgattaattcacacatcatttcaattgcagcttcaaaaatgcttcaaacccgataacaaccaggcttttggcaaatgatatatatcaaaaacaccttttgccatttcggtatcttaccatccgggccatttgaggggaattatgtgttttagctaggttcctggttgttatacggatttttttacatcttgtggatcctgtgaaggagctacaagatcttcctgttcatgaacgccatagattgacaaaatctctttgcgagcttctgagggtaatgtatgtagcaccaaagctgtttgtagcgtttggcgatcaatgcccaacattgccaatagggtatcagcagatataggggggcgttcatgcattaacccggaaagcccgtatttagccatattcagctctatttcccggacttcattttctcctaatttattgattaatatggagaacatcttcaatgtatcagcattcatttcttcgatagacgttccctgcatagctggtattaccgggagatactcaaccccaggcccacgacgcccttcttgcgaacgcttaggccatccttctttcttcgctcgtttgtgcacgccttgtattgttcctggcattccgtccagttcagtaatttgtttgggcgtcatccactggtttatctctcttgaacttttcataaactaagtttaccaaaattatatgtatataaatcaaagtgttacaaaataaatcacaccaactcatataaactagttgagtttatttggtttatgtgacaatgtataaaacagataatcaagacagattatctgttttgataaccctttatcatacgcaatatggttgatgtgtgaaagatgagtaacgattggcatcgggctgacgtgattgcggccctcaaaaaaacaggaatccctctggcaaaactgtccagacgttcaggttattcaaccgggacactcgcaaatgcattagtcaggccatggcccaaaggtgaacgtatcattgctgatgccttaaacatgaaacctgaagaaatttggcctagtagatatctaagggatcacaatgagagagtggatatcagcaattgagtgtgcgggtttatctggtttacctggttcattaatggggattcacaaaagggcacagagagaaggatggctcaagagaagaagagaaggaattaaaggggttgcttatgaataccatatatcttctcttcctaactctgcccgagctgagtttttgatccaacaagggggaattgaaacaagcctgggccgttttgaaatcgcccgccccacgctggaagcccatgattatgatcgtgaggcactgtggagcaaatgggataacgccagcgattcccagcgcagacttgctgaaaaatggttgcctgcggttcaggctgcagacgaaatgctgaaccaggggatttcaacgaaaacggcatttgcgaccgttgctggacattaccaggtcagcgcatccactttgcgggacaaatattaccaggtacagaagtttgcgaagtctgactgggcggctgcgcttgttgatggccgtggtgcatcccgtcgcaacgttcacaaaagtgaatttgacgaggatgcctggcagtttctgattgcagattatctgcgaccggaaaaacccgcctttcgcaaatgttatgagcgtctggaactggcagcacgtgagcatgactggaatattccctcccgtgccacggcctttcgccggattcagcaactggacgaggcaatggttgttgcctgccgtgaaggtgaacatgcactgatgcatctgataccggcacagcaacgaactgtggaacacctggacgccatgcagtggatcaacggcgacggttatctgcataacgtctttgtacgctggtttaacggtgatgtgatccgcccgaaaacatggttctggcaggatgtgaaaacccgaaaaattctgggctggcgctgcgatgtgagcgagaacattgattcaattcgcctctcgttcatggatgttgtgactcgctacggtatcccggaggattttcacatcaccattgataacacccgtggtgctgcgaataaatggctgacgggaggcgcgcccaatcgctaccgctttaaggtaaaagaggacgatccaaaaggactgtttttactgatgggtgcgaaaatgcactggacaagcgttgttgccggtaaaggctggggccaggcaaaacctgttgaacgtgctttcggtgttggtgggcttgaggaatacgttgataagcatccggcactggctggcgcatatacggggccaaatccgcaggcaaaacctgataactatggcgaccgcgctgttgatgcagagctgtttctgaaaacccttgccgaaggtgtggcgatgttcaatgccagaacaggccgtgaaacagaaatgtgcgggggcaaactctcgtttgatgatgttttcgagcgtgaatacgccagaacgattgtgcgtaagccaaccgaagaacaaaaacggatgctgttactgcctgccgaggcggtgaacgtttcacgcaaaggcgagtttacgcttaaagttggcggctcccttaaaggcgcgaaaaacgtttattacaacatggcgttaatgaatgccggcgtgaaaaaagttgtggtcaggtttgatccacagcagttacacagcacggtttattgttacaccctggacggtcggtttatctgtgaagcggaatgtctggcacctgttgcatttaatgatgctgcggcaggccgcgaatatcgccgccgccagaaacaactgaaatctgcaactaaagcagccattaaggcgcagaaacaaatggacgcactggaagttgctgaactgctgccgcagatagccgaaccagcagcgccagaatcaagggttgttggtattttccggccttccggtaacacggtgcaggtgaaataccaggaacccgatgatgaatatgaaactgatcgtgatgaatatctgaatcattcgctggatattctggaacagaacagacgtaaaaaagccatttaattaacgtttaaacaaaatttaattacgaggttattcagatgaatatttccgatattcgcgcaggactgcgcacgcttgtagaaagtgaaaaagcgacttatgcacaaattgcacgcgagtctggcgtggccgcaggaacgttaagcgcattcgtgaataacaagtacaacggcgacaatgaacgtgttgcgcagacgctggaacgctggctggagaactatcaccgtgccgcagagctgccagaaccaccacgttttgtggaaaccagaacagcacgccaaatctggacgagtatgcgttttgccagcctgactgaaagtatttctgttatctgcggtaatccaggtgtgggaaaaactgaagcggcccgcgaatttcgtcgcaccaataacaatgtctggatgatcaccattaccccatcctgtgccagtgttctggaatgcctgactgaactggcttatgaactgggaatgaatgacgcaccacgccgtaaggggccactctcccgcgctttgagacgccgtcttgaaggtacgcaggggctggtcattatcgacgaagctgatcatcttggcgctgaggttctggaagaactccgcctgttacaggagtccgcccgtattggccttgttctgatggggaatcaccgtgtttattcaaacatgaccggtggtaacagaacggttgaatttgcccgcctgttttcccgtattgccaaacggacggcaatcaataaaaccaaaattgatgatgtaaaagccattgcggatgcctggcaaattaccggcgaaaacgagcgggaattattacagcagattgcacaaaagccaggtgcgcttcgcatcctgaaccactcgctgcgccttgctgccatgaccgcccacggtaaaggtgaacgtgttaatgaagattatctgcgtcaggctttccgtgaattagacctcgacgttgatatttcaaccctgctgcgcacgtaaggagagcgaaatcatgatgtcacggaatatcaaaatggcaacggaagtaaagagctggttacaggagcgcggcagccacgtcaacgaatcctggctgggcgtggcccgcccggtgcttgaaattacctgcccgccaccggagctggtcagaaacgctgtcaggattatggagcataaatcaggggttgcccgttccgtatggacggcccgccttaatggttgccagattatctggcgttaataacggcttatttatttgtgaggaataacaaaatggcaaaagtaatctttgaatttaaccgcatggaagatgttgagtttcagaaaaaaggaggtttctttgtaggaatgagtgtgcaactggaagaacagtctcctaaggagcaaaccggaccgcatgacgtgatggcaggcattatcaagagcatggctcctgaaattattgaaaaagcaacccaggagttgttgaagtcagccagagaacttgggctggaagccgaaggcgagttattccggtataacccggatgcagccaaacattaatttcagggaaggaggcatgatgataatccctcgcaaaagatggtcacgcgaagaccgggaatttatcgaagccagtgtcgggaaaatgaccgtcgaggaaatggcgaaaaaactgaacgttgccccaaccgccctacaggcacatgccagaaggcacggaatatcgttgtgtgcataccgggtcagtgagcacgacaaatatttgtgtcgtgaactttataaagaagggctggctattcatgtcattgcccaaaagatggaattaagcaatcgtgctgtatccagcattgtatacagcgaatattaattaacaggagctttatttatatggctaaaccagcaaaacgaatcaagagtgccgcagcagcttatgttccgcaatcccgcgatgccgtggtgtgtgatattcgccggattggtgacctgcaacgcgaagcggcacgacttgaaacggaaatgaatgacgctatcgctgaaattactgagaaatacgcctcacagattgcgccccttaaaaccagtattgaaaccctttcaaaaggcgttcagggatggtgtgaagcgaaccgcgacgaactgacgaacggcggcaaggtgaagacggcgaacctggtaaccggcgatgtgtcatggcgtcagcgcccaccatcggtaagtattcgcggtgtggatgcggtgatggaaacgctggagcgtcttggcctgcaacgctttattcgcacgaaacaggaaatcaacaaggaagcgattttactggaaccgaaagcagtcgcaggtgtcgccggaattacagttaaatcaggcattgaagatttttctattattccgtttgaacaggaagccggtatttaataccaccattaatatttaattagttcactttcttttaattatggcgcgatgcgtcaggggattgctcgcgcctgaaacagattactgaggaataaaaaatggttgatgcaaaagttctgaatggtgtcagcacattattacgggcttacgggcgtctgacctgcggggttctggctgaaaaaatgaatatgctgccctcgtcaatggtgtatttcctgcgtgatgcggttgatgccggagttctcactgaatgtaacggattttatgacgttccgcgccctcgtccaacgccgccagtaagacgaaacgcaacaacggaacaccccgctgttgataatgctcaatggtgcgcgttccgccgctctttgccctggctggaaggcaatgccattccggcattggcaaaagaatttgcgacaggcgtactgacctgcgagtcggtttacatcgttgctgaagtggatgacgagatgtgcaaacaggggatgccccgttttgtgatggcgtatatcgatatccggctggggcgctttatttgtggttccagtggctggaatatcaccgaccacgtcatgcgctatctcattcttgattattcaccagctccggcagcaacacaggaagtcagtgaacatgattaagtcaattggctttgtcctgctggttggcacctgcgggagtgatgcctgtgatgctatcccggcaacagaaaaaatctggcccacagagcaggcatgtatgcaggtgatggagcgcatacaaaaacgttatcccagtggaatcttttattgcgaagaggtattacgaaatgagtaagcatatttattacgaccctaaatatcgggctgaaatgcgggcgcaactggttgtcagtggatatacaccggagcaggccgatacaactctgacagaactgatgggtgagcttccatttgatgaagctgaatatgaatactggctgaagcagttcaggctggaaattctggaaaacaccacactgccatcgctgataagaataataaaaagcgttatcgacaatgcctgctacaacggtgattgcttggccgcagcaattgcgacccatgctctggtgaatctgctggaggttaccggcgcagttttcctgaatcctgaaaaggtattaagagatgaaaatacagatgattactgatgctgatttaatggctgcaaccttaatttccagtggcatgtcagaacaaaaggtaaatgatttcctggataatgtcgtataccagcactatgagcaggccagagaaaatttaatttcagaaaagcgcacgatgattgctgaatcattaagccctgcatggattatcgaagagttgcggggaatcattgccagtcaggataaagtggcggcagttgccgcccttgatgtgctacagcgaatgagtaaagagctattcaacactgaattaattttaaaatccgggggacataatgaatcgcacatccctgattaaattaattcatgttgcacgtcgggagttgcaacttgacgatgacacttaccgcgcttttctggtgcagtgcacgggcaaaaccagttgtcgcgagctgtccgttgcacaactggaacaagtgctcgatgccatgaaagagcgcggttttaagaaacagaaaaaatatccccgccgtcgttttaaggggcatgtcacaccacgcgagaagatttacaaaatctggcagcagatgtttcttgacggtttcgtctccgatatcagcgacgctgcgctggacaaatacgttgagcgcctgacagccagacgtaatggcggacagggtgtttccacgctggcatggtgtcacggggaatcgttgcaggttgtgcttgaaacgctcaaacagtggcatatgcgctgcatccgtgaagcctttgcccgacatggtgtgcctttacctgtgagcgaaaccgggcgggagctgcgcggctatgatgcactgaccagtgcgtatgcccgcgcacgaaacagcgggagaattgctgtatgaaacagatgaaagagcaggatttattcgaagacttccgggacgacagcgttctggaatatcttcacgattatcaggaaaaatatgtttacccggcgctactttcagaactgaatgctctgttgcgacaggaactgataaggcttggggttaacccggtccattcccttgagttggtagtggcgatttgtaatcatatcggtgggattcaggtatatgttcctaaagggaaaatactggaaaatcttatcagagacatgcgcatctggcgtgattttgatgggaaaaacgtagcggaactggtgcagcgttacaaagtgacatacaaaacggtatatcaagctatcaaaagaatgcgaaggctggagcgtggaaaatatcaaatgcaactgtttaaggatgagtcatgaaatactttcctcttatacttttactgagcgtattttgcgctaatgcggcaaagttgccagctgaagatgtcatcaaaaaacgtctgacagaaaaagatctcattgcactaaatagctggaagcctcttaagggaggcgattctattaagaacggtggaactgaaactgctcacagcaaattcggggtatttacgatcaataataaagtcgtcagctcaaggacgacggtaaaggattttgaaaacaatccttcaggtgtgttgtcttcctttgtagcatgctcgcgggttgcagagtcagcaattggtgaactaacagagaagcagcagaaacgaattattgacatggtagtttcagctacaaaagttgaagggtatgggttaactgacgtgatacagggttttctcatgcaaaccaaatttctcaagatgggtaacgatatggtaatagattgctccatcaaaggagatgagtagttatcttcccttaattcaatgaagccggtaaatccggctttttttatgcctccggcaccatgaagcagaccacgtttaactctgcttcacaggtgtttttatggaaaatcaaaaattctccccggcctttgaacatgcgctgaattttattctgcgtcctgatatcgaaggcgtttatgtcaatgaccccactgaccgtggcggtgaaaccaaatacggcatttctgaccgccgcgacggtgtgattgacggcaaaaccgatgtcagcggtgacggcaaaccggatacccgcatcaaagatttaacccgcgaacaggtcgcgcagatttactggcgcgattactggctgcctgccggatgtgaccagtggcctgatggcgtggcgatgtttgttttcgatgcagcggttcagcatggcgttaaaaaagccatcaaaattttgcaggaagccactgatatcaatgccgatggcatcatcggcccgcgcacccgcagggccgtgaacctggctgaccagaactggttgctgacccgctgtattgtccgtcgttcccgcttttatgccgaaatcatcaaatcaaaacccgcccagggcaaatacctgaacggctggtttaaccgcatggaaaaactgaccgacgcctgtctggaaatcatcgacaacgcgccgtccaccacgcgggggtgatatgggcaaaggctgggatgcctcactgaaagccgggcggcgtgaccgcctgcgtcaggaggttctgcaccgcatggccggaggtccgtccccgaaaccgctggactataccggccatgacggcacacacgccagctactacatgcgtggctggaactctgtggatacacgggacattttctggcagtgccagaagtacagggaaaaattcaatgtggaaaaaggtaatgaacaaaattttaaaactgtgtgactggctgctttgttcccgactgatgagaaccccatggccgctggccggactgacactctgcatgttcatcatcagcatgttatgtggctggcgatcgttcgtgttgatgttgttgtcctttgccggggtggtgttgttttcatacagcgcaagcctcgggaatgtgccatttcgcctgctgcctgaggtccgttaccgggcttttggtcgccacatcatcgtgtggtcatgggtggtctgggcgctgggatatttctgctgcgtcttcagcacgctgatgatggtgtcaccggtgcatccggtgttctggctgtgtggtggctgttgcggcggtctgctctgtcttcagcgttatctgtatggaggtttcccgtggatccgttaaccctttcaggcatcgcctctgttctgctgaaagccgggccggggctgattcgttccgtcgggcgctggtttggtggcagtacatctgccgccgctgactcggtggccggtatggtggaaagcgtccgggaaagcctgccggtggctgaacagcaacgcattctggaacaaaaactggtgatgctgtcaccggagcaactgatgcagctggaaaccctgaaagttcagctgcaacagctggaggtggagcggcagaagctggtgctggctgaccagcaggccgcacaccacgaacagcaggaaaccatccgcaatggtgacaacgccacggacagctatgtgcgccagacacgcccgctgctggcccgcctttcctgttacagcagtctggcctatgtgctgttgctctcctgcggccagattgccggagccattgccggtgccagaggtatcacgctgcatatgccatcaccggactgggatatcacgctgatgttgcttaccccggcgctgggctatctcggtgtaagaacccttgacggctttgcccgttacagcaaatcaagccgtcacaaaatgtctgcggggccgaaatgaccgacgaaatcgatcgcatcagtgaagtggttctgaacgagcgtcagagcgtcgttaaagcctggcagacacggacaaaagaagcgccccacagccggggcttctgcaatgactgcgggaacgttattccggcacagcgccttgcggcgctgccggatgtggtgacctgtattgactgtcagcagatgcgggaacgcaggaggaaatcgtgtcctgggaaatgatccgggccaactggcccattctgtgggcattgctgatgacaggaataaacctgcttcagctgattctggcgaaaacctacgtcaaacgcgaagagtttgattcactccgttcccgcatgtcggtgatggaaagccaggtacaccatttacccgaccgtgatgagttccaccgcctgcaactggatatcagcaacctgcggggagaaatcaaagagctggggccatccatccgccaggtatcccgcatcagcgatttgttattagagaacgagttaaaggaaaaaaaataatggcgatgaaagagatcctcactgaagaccgtcgtcttgtgttgctgcgttccctgctggactgtggcgacagcgcgaatgaatccgtgttgcagacctgccttcaggcctacggtcataaggtatcccgtgatgtggtgcgcacccagcttgcatggctgcgcgagcaggggctggttcgtctgtctgatgtgggcggctgttacgtggctgaaatcaccggcagcggtgaggatgtggcaaacggcctgtccggcgttccgggcgttaaaaaaccccgtgcgagggactgagcatggcccgaaaactgaagccgttaagtcgcggagaacgggccgtcgtgcggcagctagcgtactgtcttgtgctcgcggatattgagcaaaacgccattgcctgtgcatacgaacaacagaccggaaagccctggaacccggatgcaccggatacccccatgaaacgtgccctgcgttcatcaccggcatgtgcgcggctgtggaagctgctgggtaaggatatccgctccgttcgcgaagaaatatacgccggtctgaaaacaccgggaactgaagacgggggccgtcgtgaaccgtaaaaagaatccgataagtaaagcgtcccgtgatgaactccgccgtctggcgcacaacctgacatggcgggaaatccagagcggcgcactgaaatctgcatacgaaagtttacagcgtagtgagcaacaggagggcacacatggaaaatgaacaacgccccacccgtggccgtctttccaaagtggatttactcccggacagcatccgggagcagttgcatcagatgctgcgggaaaagcggcacacgcaggaagaaatccgcgaagccatcaacgccctgattgacgaacacaacctgccggaagagatgcagttaagccggacgggcttaaaccgctatgccatccgcatggaaaaagtcggggcaaaaatccgtgcctcccgcgaaatggccgaagtctgggcggcaaagctgggttccgcgccgacgtcagacgtcggcaaactgctgatggagtttgtaaaaacgctggcttttgaaacgtccatgtcgatggcagaagacgacaagcccgttgcaccgaaggcgctggggcaactggcgctggttgcccagcgtctggaagcggcagccatgaccagccataaacgcgagaaagcgatccgtgatgcgtttgcgcaggagatggcagagaaaaccgaagaactggtcagaacgggcggtctgtcaggcggtgcggctgacaccatcaaacgagacattctggggattagcgtatgacacaaatggatacgttcagtgaatatgatgttctgctgccgtatcagaaacgctgggtggcggatgatgccgacctgaaaattgccgagaaatcccgccgtaccggtttaacctgggcggaagcggcggatgcggcactgacggcatcactgaagaaggaagacggcgggcgcgatcacttttatatcggttcgaataaggagatggcccgcgaatttatcgacgccgtggcgatgtgggcgaaagcgtttaatgcggcagcggaagaaatctgcgaggaagtgatcaccgacgaagacaaggacattctgacgttcgtcgtgtacttcgccagcggttttaaggtcaaggcattgtccagcaacccgagcaacattcgcgggatgcaggggaatgtcaccatcgacgaggccgcgttccatgaaaaactggacgagctgctgaaggctgtgctgccgctgaaaacatggggcggcaaaattcgccttatttccacccatgacggcgtggacaacctgtttaaccagctgattcaggaaagccgcgcgggcaaaaaagattacagcattcacaccatcacgctggatgacgcctgcaatgacgggctgtaccggcgtatctgtcaggtgcgcggcatggtgtggtcaccggaagccgaagcggaatggaaagaaggtctgctgcgaaataccgccacccgcgaagacgcactggaagaatattactgcgtcccgaaaaacggcggcggcacgtatatcccccgctcactgcgtgaacgtgcggcctgtggcaccgggaaagtgttgcgctttaccggcacaccggaatttaacgcactgacggaaagccagcgccgggcagatatccgggaatggctggaaacagtggtgcgccctgaactggaaaaactcccgaagaacctgcgccactgtctgggggaagactttgcgcgttcgggtgacctgaccgtactggccccggtgacggtgaacgatgacaccacccgcgaggtgccgtttctggttgagcttggcaatgtgccgtttaaacagcaggagcaggtgctgttctggctttgcgatcgtctgccccgccgtgacggcatcaaaatggatgcgcgggggaatggtcagtatctggcagaacaggcggcggagcggtacggcgacgaagtggaacaggtgatgctgtccgtggcgttctaccgcgaaaacatgccccgtttccgtgcggcgtttgaagatgatgagctgatccttccgaagcatgaagacgtgatcaatgacctcggggccattcagttactgcgtggcgttcccggcattgatgattcacgaaccagaggcagcgacggtcacaaacgtcacggcgacgccgctgtggccattttcctgggcttccttgccagcaaggatgactgccaccgttacgagctgcaccgcctgaaccgcccggcgaaaccggaagaacgcaacgcgcgccgccagatgaagctgacgcgcggcctgaaaaatgagggaggtttactgtgaacctgaaacaactggccggggccgttcgccgtctgctgaacccggcaaccggtgaggaagacacgctgaaaaaagaggcgctcaacgaagcacaggcacgtccgcgtcatgccagtgtgcgttcggcctcgccgggcgtcagcattgcttccgggctgaatcccggcaggctggcaggcattctgcgcaatgctgccgacggcaccacgcgtgacttttttatccttgctgaagagatggaagaacgcgatttgcattacgcctcggtgctgcgcacccgcaagctgacggtggcgggtatcgaaccggtggtggtggccgccagtgatgacgatgctgacgtgcagctggcggacgccatccgtgcactgatggaagcaccgcaaatccctgagctgatgtttgatctgctcgacgggctgggaaaaggcgtggcggtctgtgaaattttgtggaacacccgcaacaaccactgggtgccccgtgattatgagtgggttgatccccgttttctgaaagccgaaaaacccacgctgcgccagttccgcctgctgactgacgatgaaccggtggatggcgtaccgctgacaccgggaaaattcattgttcaccagccgcgcctgaaatccggtctgccgctgcgtaacggtctggcccgtctggtggcggtgatgtacatgctgaaatcctttaccgtgcgtgactggtgggcattcgcggaaaagttcggcattccggttacggtggggaaatacggtcccaacgccacggaggagcaaatccgcgtgctgattgacgcgattgcgtccattgcctcggatgccgggtgtgccattccgcagtccatgcaactggagatgcaggaaactgccagccggaataacggcggcgcactgttctgtgaaatggcggaatggtgtgatgcgcaaatcagtaaggccgtgctggggcagaccatgaccacggataacggcagttcgcgctcacaggcggacgtgcacaatcaggtgcgcatggacattgtgcgctgggacgcgcggcagctggctaacacgctgaatgaatttctggtgcggccctacatcgaggccaactacgggccacaggcgcactacccccgtgttgttctgcgtatcagtgaagccgaagatctgaaggcgctgacagatgctctggtgccgctgattgaccgggggatgcgggttcaggaatcggagctgcgggaccggttcggcctggctgaaccggacgacggggctgatgttctgcatccggtttctgccggaatgtcaggtgatatggcgatgaaccgcgagcgcgtcgccctgaaccgtgaacactccgacgaactggcgctgatggtggatgatgccctgcgtgactggcagaaaaccggcgaggtgttcacgaacccggtgctgacactggcgcaggaatgcgacagttttgatgactttctgaaacgcctgcctgagcttcaggaaacgctgaacgcggacgactttgccctgcaactggcggaggtgtgctttaaggcccgtgcgctgggggacactgctcatgcgtgaaaccttcatcccgaaagaggcgctggcgtggctgaaggcgaagaagctgcgccccggttttgattaccgggatgtatggcgggaagaacaccggaacagcttcaccgtggcaaaaatgctgcaactggatttgttgtcggatgtgaaagcccttgtggaagacgccctgcaaagcgggcagacgttcagcgagttccgggagatgctgcaaccgttgctgataaaacgcggatggtggggcgtacaggagatggatgatccgctgacgggtgaaacccgcaccgtgcaactgggcagcgaccgccgcctccgcacgatttttgacaccaacatgcgcaccgcccgcgcggcgggccagtgggaacgcattcagcggacaaagcgggccatgccgtatctgatttatgagctggggccatcccgtgagcaccgggcggagcatgtgaaatgggcgcgtctgtgtctgccggtagatcatccgttctggcagacacattttgcccctaacggctggggctgcaaatgcaccatccgtcaggtcagccgtggtgagtatgcgcaactggcggcacagggcaccattcacaccgaagcgccggaaatcagaactgtccgctgggtgaacaaacgtacgggcgaagaggaagaggtgccggaagggattgatccgggctggaactacaatcccggcataaaccgtgagcaggagctggcgcgccagctggcgaccaaacaggcccgttttgacagtgagtagccctcccgccgtaaatccccctgaaacgcatcagaaacgcgttttttattctgatggcgtgaatgtgcattctgacgtttttgaagatgctgtggcgtttttgaagggggttttgaagggggtgtttccccgttttcagtgaagccggtaaatccggctttttttctgccttccgcatactgaccgtcggtaaccccaaacgacggagactgacatgcaaccggaactgctggcgctgtgtttttccctgccagaacccatccctgagctgacacctgctcaactgccggaatggcttgaactcgtccctgcgggtgagttcaccgggcgcgatggccggacgtggattaaccgcaatccgcatgaggtggtcacccgctcgtccgacatcaaaattccggtggacattgaacacgccaccgaaattaaagggcaacgcggtgatgaagccccggcgtatggctgggtggaagaactgcgcgtgacggacagcggcaccattgaaggccgtgttgtctggagcgagtacgcccggtggatgctgagcgaacgccgctaccgctattacagcccggcgtttttctttgacgcagacggtgtggtgacgcgcctgtccagcgtcgggctgaccaacaaacctaacctggactttcctgcactgaatacggagaaaaacccgatgacagtacctgtgcaaatcaccggcctgcttgggctggctgaatctgccacggtggacgataccgtggccgccattaaacaacttcaggagaacgaacaggtggcgctgaaccgcgcacagacacctgacctgacgaagtttgtgccggtggaaacccacaatctggcactgaaccgtgccgaaaccgcagaacaacgccttcagcaactggaagagaaggaagcagaagcgcttgtggatgcggccatcgaagccggaaaagtggccccggcaaaccgtgacatgttccttgccacctgccgcacggaagaaggccgcaaacaatttgcggaatacaccaaaggtgcacagccgctggtgaacaacgacaagcccagccagggcaaggataaacccgcgcagacactgaccgacgccgaactggcgatgtgccacagcatgggtattaccggggaagagttcctcgccgctaaacctaaacaggagaataactgatgggagcagtcacttccgaagtccttcacgcgctgaccacctgtctgagcgccgcttatacccgtggtctgagtggtgtcaccccacaatggcagcgcatcgcctctgaaatcccgagttcgtccgcttccaatacctacggctggatgaaagatttaccggagattaaggaatgggtcagcgcccgtcagatggcaacgctggacggttatggttacacccttgcgaacaaaacctgggaaagttcgatccgcgttaaacgcgaacacattgaagacgatcagattggtcagtacagcattatcgctgaacgctatggccgccagacgtcggagttcccggacaagctgtgttaccccctgctgtgtgccgggtttaacaccctgtgttttgacggtcagaacttctttgatgaagaccacccgctgggcgacggcacctgcagcaacgttgtcggcaccccggcatcagaccagggagaaccgtggttcctgattgatgattctcaggtactgaaacccatcatctggcagacgcgacgcgcctttaagtttgaagccctggatgatctgaacagcgagcacaccttcaagaataacgagttcctttacggggtggacggtcgctgcaatgcgggcttcggcttctggcagaccgccgtcggttcccgtgcggcactgacagcggagaactacgagaaggccagcaatctgctgctgggtatgaaggccaccaacggtgaaccgctgggcatccgcccgaccacccttgtggtggggccgaaaaaccgtgcagccgcgaagcgcatcattgacgccatgctggttaacggcggcgattccaacatctggtacaaggatgtggacatcgtggtcagcccgttcatcaccaccccggcataacccgtcatccgtaatctgttgtaacccgcaatgactggctgattagctgtatcggcaccaacctgtcaccgcacccggcgtggatgtgggccgcgtcatacggcgcaacggcagcgtatcaccttgccattgacccggcgcgtccgcttcagacgctggtcctgaccggcattctgccgcctgcgcgtaatgttcgctgggatatgccggaacgtaacctgctgctgcatgacggcattgccacgcacatggtggacgccggggataacgtctgcatagagcgtgaaatcaccatgtaccgggttaatcagtacggtgatgcggatgtgtcgtaccttgatgtgcagtcacccgccacgctgggccgtatccgttacatcatcaagaaccgtttcacgaaccgttatccgcgccacaagctggcagatgatgacgtgctggactcactggatgccggtcagccggtgatgacgccgaagctgtgcaccgcagagctgctggatatctgccagaccgaacttattcctgcgggccttgtggagaacttcagcgattacaaggacacgcttcaggtgacacgcgacagcagcgataaaaaccgtctgaactttatctgtcacccgaatctggtgaaccagctgcgtgtgctggcaggcctgattcagttcaagctttaagggggccgcatggcaaaaattcttggcatggcgaccattcgcgtgaatggccgcgaaattaaaaccgaggggaaatccacgctgaatccgggcggcttcagtcgcacccagcatatgggcggcggcaaggtctggggtatctccagcaagatggcctcgccgtccatcaaggtgaccattgcggcggcagcggatatggacgtgattgaaatcagcagctgggaagacgtcacggtgatgttctacggcgacaacggcctgaactacatgatgacgggtccgccacggataacccggcggagctggacgaggattccggcaccatcagtgcgaactttatcggtgaaaaatgcgtgaaggtgtgacatggctgaaatggaatttgaactgaaacacgggcttctgaccggcaaaggcacggcagatgaaaccctgcataaaaccgtgaagctgcgcgaactgaccgccagtgatgtgattgatgcacaactggccgcagaacgcgtcgtcatgggcgggaacggaaaggcggtggcctactgctctgaagtgctgatggggctggagatgatgcgccgtcaggttgcggccatcggcagcattcccggcccgctggacatgaaacagctgcgaatgctccacccggcagaccttgagcttatcagcacgaaagccgctgcgctggatgacatgcttgaggaggtggcaacgcgggggcgaactgatgccgctggcggcggcactgatgaacctgctggttaacctgtcccagcgattcagcattcagtacctggaacagctgcccctgcggcagctgttccgcctgataaagcaactggagaaacagcatggcaacaggtaaccgtctcagcacggaaatcatgatcaaccttgccgggaacctgaccgccaaagcccggcaatacggcgcaaatatgtcgcagttcgcccggaatcatcagaaggccatgcgccttgtcaaagccacaacggaggccgcaggacgcggccttgatacgctgggtaaccgctacacggcgatgattgccgggttcggtggtggtatgacccttaaaggcctgacagattttgatgcacaaatccgccgtgcgggtacaaatgcaaaactgaccgatgagcaggtatcccgtttaagaaaaaacatccgggaaacagccagaatgtcagacattcgcctcagtgcgcaggttttactggaaggccaggatgcactgtatggcctgacaggtaagccggaatttgttgaaaaaaatatccgcaatcaggggctggccacgcaggcattcgggactgcgccacaggatgtcgcggcactgatggcacagatgtccgaaaaacagattgaagatcctcaggaagttgaagacatgttcgaccgcttctaccaccagttttccattggttcggttggtgtggatcaactggcgcgcgtatcagcaaaactgttttcgatttataccggtggtggcaaagaggcgatggcccagttgggggcacttgagcagatgctggcgaaaacaaccggttctgcagatgaagcggtaaccgcgctgaacagtatctggagtgaagtcacccgaaaagacaacatcaagtttctgaaaagaaacggtgttgatgtgcttgatccagtcacagggaaaccccgtctgccctatgacgtgatcagagacgttgtcaggcgggcaaaatttaatgagcagaatttgcaggatgttttcggggacacctccatgcggggattaagggcgctgtccagtgaagaagcccttcagttaacagaaaaaatgatttacgccccggttgaatccggtgccatgaaaaaagccgcggagaaaaacgcccagagttttcagtctgcgatgcagtccctgaagaatgaatatgaggtttttgctgaaaaaaatctggcaaaacccgttcaggacctggcggatgcgctcaacagcgtggaccagaacaccgtccagaactggttgcaggtcggtaaatatatggcgattgctgtgggcggcattatcgccatccgaaaaacgtaccagttaggtaaaaccctccacgacatcatgaatcccaaagggaaaggcaaaggaatacccggtggcattacagatgttttcggctccggtgtgatgccggtttatgtggttaatatgggcagtggcgggatgaatggtaataccggcggtctgccggatacaccagattcatcgcgcaatccccgcaatcctcgggggccgggtaaccgtggaggaaaggcaggtaaaggcgctggcatcattgccggtgctctggagttttacgattttctgaccacacaatacgccctgccgggtgaggttgacagtctcactaaatccgttgccggtgatgccagcgccagcccgcgggagcgcgagttcgcgcaacagagtcaggacaaccagaaagcgctcgagtccgtctggcgtaaggtaacggactggtttgactcgctgaacgggaagaacatcggcgggatgccgtcatggggtggaatgcaaccctcgcagcttgcaccgtttctttctcaacaattgcagggggaaatccgcgtggtggtggaaggtgacgcccgcgtgaaaagtgtcagagtggatcaacccggcgtcagactcagtgcgcaggctggcgtcaccagcgtggagcaagggtaatgacaacaggcaatggcaaatgggacgggctgcgcgacgcctcgtttcgcggcgttcccttctttctggtggatacagaaggcaccggtggccgcagggctattccccgtgcttacccccggcgtgaaaccgcctggacggatgataacggggccgttcccggtcaacaacagattaacgcaaagctgccaggtaaaaacttccgggatgatttaaacgcccttttagacgcgctcaataccccaggccccggcgagcttatccacccgtggttcgggatacagaccgtacaggttggcaaggtcactcatcgcctcagcacggaggaagacggcattgcgtatgtcacctttgaagtgtttgaggcaggcgagcgcctgttcccgtctgcggcggataacacgcagcaggaagtgctaacgggcattgatgcggtgaaagccgccattgacgatggcgactggttcggcgcactcgacgggctgggtgagatggccgacagctttctggccgatatggaaaaccttgtggctaacctgcccacgctaccggcagcactgaatcagtggatggacaggctgaaccattttaaggagatggccggaaccatcattgccacgccggggcgtctggtcagtgagttgtcctcgttcatcgacggcgtggttgatctggtgacggaaccacccgaagcactcgcggtttacacgacattacgcaaccagtgggtcggagaacgcgcccgacaggttgccaccggcgcactgccggaagatatcaccgtgaagccaggcagcgtggcagacggcgaaatcggctttgccatcggtctgtcaccgggttatcagccggtatctgacagcctgcaaaagaacattgatgacttccgccaggtggttgtgctggaaaccctgctgggacaggcaaatgccgtggcctcgatgacgttcgataccagtgatgcggcattatctgctggtgacacgctggcggctgaactgcatgagcaggcggtggcggcggtggaaaataaccagcgggcattatggcgaacgctgcgcgatttacggcaggccgtgattacggatgcccgcgagcgtgccgcccgtctgccggaaacccgacaggtgacgctgaccacaaccacatctgccgcattgctggcatggcgcgaacatggtgacacaagccgacgggatgaaatcgtgcagcgtaaccgcctgcgccatccgtcattcatcctgccaacgcaaccagtggagattaccgactgatggaatccgtgattcttaccgttgacggcaaattgtgggaaggctggacggaaatgtccgtcagccgttccctgaaggcgattgccggtgagtttgatctcagtgtgacaacccgctggtcagcggcggcaccgcgcgtgatacgtgaggggcaaccctgcacggtcaggctgggtgcggataccgtgctgacagggtatatcgatgattttatccccagctatgacgcagataacgtggagattcgcgtcatggggcgcgacaaaaaccggcgacctggtggactgctctgtggtgcattcatccgggaaatggaaaggcgtgcggctggaacaggtagcggctgatgtctgccgcccgttcgggatagccgtcatcacggaaaccccgaccggggaggcgtttgcgtccgttgttctggaacagggtgaaacgggctttgaactgctcgaccggctggcaaaacagcgcggcgttctgctgacgtctgacggcgcaggtaacctgattatcacccgcgcctcttccgttcgcgcgggcgtgtcactggtgctggggaaaaatatcctcgccgcccgtgggcgcttcagctggcgggagcgtaacagccagtacatcatcaagggcaccaccagtgccggtggcaaactgtgggacagccagcctgcctcgatggtgggtggtcgccagtacatcaccgaagacccggaaattaaccgttaccgcccgcgcattctggtcaatgaagacagcctgaccgtgggcggggccagcattcgcggggaatggtacaaagcccggatgctgggggaatcccgcacgacggaaatcacggtggcaggctggcgcgaacagggcgacagcggcccgctgtggcagaccaaccgccttgtcgatatcgacgacagcattcagaacctgaaaaccacctggctgatatccggggtgacctggacggatggcgcacaggggcggatgacggttctggcgctggttccgcctgaatcactggatatgccggaaatgaaagcgaagacgaagaaaacaaaggcggtggccacatgggattaaacgcaattgcccgccgtctgcggctgctggttgaccgtgccgttgtgcgcatggtgtctgacagtctggagcggcagaacctgcaaatccagacgctggctgatgccaccgacgacgacgtggaacgcttccagaactacgggtttacttccgttccgccggaaggttctgaagccatcgtgctggccgtgggcggacggcgtgacgggctggttgccatcgcggtggaggacaagcgatgtcgcccgaaaggcctgtcccccggtgatgtccggctgtatcaccaggacggtaaatcgcatatcacgttaaagaaaggcggaattattgaaatcacaggagaacaattaaacgtttcagggaaaacggtaaatctcaccgccgacgaattgctgaatattatcggtaaacaaatgaaattcgtcggtccctgtgaatttactgcagatgccacaatcaacggtaaatctttcatcaaacacattcataaggacggcgacaatgagaagacatcaccgcccatatgacgaccggaatccgctggaataatactctctcacggggtgacatcaccgtcacccataacggcctctcactggatgaggggctggtcactcaggttcttatctgccttttcactgatgcccgtgctgatgacgatgatgtcattccagatggttccggcgacccgcgcggctggccgggcgacacgtacagcgatttttcgtggggttcccgcctgtggctgcttgagcgcgaaaaactgacggaagatgtccgcctgcgcgtggaggattacgcgcgactgtccatgcaaccgctgctgcgggccggttacgcccgtaacgccaccgtcacggccagaatcatcgtccctgaccgtattgcctttcaggtggtgttaacccgcccggacaaaaccacgctcacaatcgaaatcacccgccgatgggaggccaccattaatgccgtatgaaatccccacgctgggcaaactgattgccgacggcgaaaaagatattgcgtatgaactcggcctgcaaaagctgccgcctgtcagtgttgagcaggcgctgaatgtgtcattcagcagtcaggtccgggatttatacgaccatcagagctggatcaaggaccagataattccgtccactacgtctgatgatgaaaccattatcaaaaacagcaacgtatgaaggggttatccgcaagcaggccacctttgccagcgggccggtgaccttcaccagtcagtcccccattccggcagaaacccggatgcagtccgacacgaatcaggtgtatcaggtactcacatccggcgaggtacaggacggcgaggtcactgtcatcgtgcaggctgaagaagccggtgtggcgggcaatcttgctgccggtgccgtgctgaccctgttatccccgctacccggaacgggcagcacaggcgcggtgactgaaagtggcatcaccggtggcgcagacatcgaatccatcgcagagctgctggaccgtctgctgtatgtgcgccgcaatcccccggtgggcggtgcactgcatgattacgtcatctgggcgcgtgaagtgccgggtgtcagccgcgcgtgggcatgggatgcgtggcacggccccggcacggtcgggctggcatggctttatgatgaccgtgaagacattatccccacacgggacgacctgaagacaatggagcagtatctgttctgccacaaacaccctgccaccggcgtgatggtgggcaaaccgggcggcatcgaggtctggccggtgcaggtcaggctgaagaagctcgacctgtccatccgtctgacaccggacagccaggcgaacaggaacgccgtccgggcaaacctgaccgcattgcagaaaacgctggcccccggtcagatgctgccggtgtcctcgctgcgcacggccatcggtatgacgtccggtatcacggattacttcctcaacatcggggaggacaccaccagtgatgtggatgagcttatcaccatcggggaggtgacatggctcacagcgtgacggaatggctgaccgcactgcaacaggtcatgccacggggtaaggcatggccgcgtgataacgacgcggatttaaaccgttttttaagggcgcttgcagagcgtttaacccgcgttgaatacgacgcctcgcgtctgcatgtggagatgcgaccggaaaccacgctccagttgctgccggagtgggagcaatatctggcgctgccggaatgcggaattgccgccaccacaacggaagcccgccgccgggccgtggtggagaaataccgccgcaaaggcgggctggccacctggcagattgaagccgctgcggcggcgctgggattcactattaaggtgacggccgttctgccgcaccactgcctgcgtgactgcatgtacccgctacatccggcgcggtatcgctggctgctgaaagtggaagtcccggacaaagatgccgggcggtttacctgtattgatgacgtcatgacgccattaatcagcgaacggacccgcgagctggaatgcctgctgaagcattaccggctggcgggcacggaatatgaatattattacaccggagaataatttatgttttcatgtggataatccgacgggtgtgccagtgatgccacctgtcgcggctgaattaagcaaaacaacgctttattttaccgaaggcgggaacggtattccgcccacttatccggggccggactggtttaatattattcagtctgaattactgaaaattctcgaagaagccggaataacaccggataaagcagataccggtcagataatggcagccctgaaaaagctgtttattacgaacagtggttcagctggtgccattgccggattaaccggtcagaataatacattcccgtactttaccggcgaagacacaatggcattaacgccgctcagtgcttttgtgcgcggtattctcgggaaaaacacagccggtgaaattatcgacgcgcttttattacgtgacacggtaaataaagctaatagtgctgtaccgaatacccgcagggtcaacggcatggctctgtcttcggatatcaccatcagcaacatcagcggcaacgccggaacggcaacccgacttcagacggcccgcaggattaacaatgtgctgtttgatggcagccgcgatatcacgatttctgcgggaatgtcacaaactgaaggtgacaaccgttaccagcaaaaaaacacggcgtcaaaagccggtaatggctggtttaaggacacgtccaccggggtgattattcagtgggggtatctcggcaatgccagtgccgggctgacgtttccgatatcatttccgtcagcatgtaccagcatcactattaccaacgcatacacccgtgctgattactctatttccctgaaatcgttatcagcagcaggtgcgacattcaacagcgagaataacggcgttatgtactggacagcgatagggtattaatgatgactatttatttcagcccatcaacaaacggtttttatcattctggccttcagggtgattatgaaaatgcgggaacgtggccgaatgatttacaggaaatcacggatgaagaatatcagagactgttacagggccagactgacggttttattattgtatctggcgaaaacggatatccggtattaaaagaacccgtaattaactggcagcagaaagcggaaacgcaacgccagcacctgctggctgaagcaagggaaatcacctccgactggaaaaccgagctggagctgggcaccatcagcgacgatgataaagcccgtcttacgcagtggatggcatatatcaaagcggtaaaggcactggatttaagcaccgttactgacgaagactccttttattccatcaactggccggagcgtcccgatgccgcagcttaaaggtgtgattaaaacgcccacgggagaaccgctgggcggcgcaaccattacattgacctccctgcacaaccgcgcagggattctgaaaagtgttttcagccatgtcaccacacagaacggggaatatgacttccccgttctgccgggtgtgtacagcgttcgcctgacacaaagcacacagcgcctttcagaaatcggtgtcatccgcgtttatgaagattcagcggacggttcgttgaatgattttctgggtgcaaccgatattgacctgcgcccggaagccctgaagaaattcgaagagctggcgcaacaggcgcagcaaagcgcagaagccgcagcggaaagcgagcgacaggccgggcaacatgtcgctgatgcgcagaagataaagaaagactgtcagacgctggcggataacgtacagcagaacgcagaagccgtagcggccagcaaacagcacgttgaacagctggcctcagaagttgagctgaacgccgggcaggtgcagcagggcgtgcagaatgttactgatgcggtaaaaaaggcgcagcaggcagcaaaggattctgctgacagtgccacagattcgaaaaacagtgctgacaatgcggcactgagcgaacagaacgcacaaaaacacgcgcagaaagctgaacaacacgagcagcagactaaacaatatgcgcaggatgcagcgaccgccgcagaatcagcagagaacgccaaaggcgaaattgacgaaattctggaaggtggctatctcaagataaaaaacaactttcaggaaattgttgatgctggcccgtcagcactggctcaggcccaatggaatttacagatttccggggtgaaaaataaacaggtaattgccaccccttatacatggccatccagaactgagtatgaacaaagggtgcatctgccactcgccggggcttacggatttggctacacatttgaagaccaaagccaggggcgaataaattttaatgagggctatacggcgtcgtggtggtcacagtgggcgaaacctggtcgttattacgtcagcgccagtgataaagaatacctcgcacctgaaggagaaaggtgggggattgttgatttgctgtggcttaatggcagcggatataacgatgcttcgaaggttctgaagatactggctttttacgactcagacgggcacttacacataggcaagcgcgttggtcagagcgactggtcaataagctggcgcaagctggcatcgctctctgatgtcagggccatgctgtattcatatatttataataattacaacagagaatggcgagacccggaactgggaggtttaattctggcgtcataccagggaaccgcagacggcgacacaaatataaaagtatcccgtggtcagacttatcccggctcgcgactcgctcctgtggcgatagaatgccagttcaccccatccggcacgtatgctgcaacaccgcgattctacattaccggctgcaagagcaaatcactccccggaacttatatttcattgtctggcgcgccaacaacatacagcgaccaggcatttgttgcgctattcatgaggattgtatgatgcagattaaagaaatcaccagcccccgttataccgaatccggtgcgattgactgcgacgttctgtttgaggaaatggaagcccctgttccctacactgccacgccggacgatacagcgaaaaccggtcagcaaatctggcaggaactgcaaagcggaaaatggggtgaaataaccccgtttgccgtcacgccggaacttatcgcagcggcgaaggatgccaaaaaacgggagattgaggcatggcgcacagaacaggaggcgcagccattcacgttcgaatggaacggtcgtacctggaatgctggtcccgattcgatggctcgcattgcgcccgtggcaatggccgcaaaagtggcaggtgcacgggcaacgctggggtggggggatgcagcaaacagccttgtcaccatgacaatggcgcagcttcaggagctggcagcaacaatggcgcaggcgcaaaccgagcgcaatactgtgatttatcgtcgtcagcgtgagatgaaagagcagctttccctgttgaccacactgaacgaaataagagcattcacacccggcgattaaataatcattttgtatagtttatgacgatcgataacatcatatcgatcgtcggtttgcatcatatgtgattaaatacccccagccctccgggcggtcatgtctggttattacacagggggaatcatggactctgttcgctgtaaaaactgcaataaattactgtttaaaggaggttttaagcatatagaaattaaatgccctcgctgtaaacgttacattgtcatatcgaatgccaaagagcatcccacggagctgtattgtgggaaaagagaagaaatcacgcattctgacaaaaccctgcgttattgagtatgaaggtcgtattgtcggctatggttcaaaggagctacgtgttgaaaccatatcctgctggctggcccgcacaatcattcagacaaaacactattcccgccgttttgtgaataactcctacctgcatcttggcgtattcagcggacgtgatctggttggcgttcttcagtggggatatgcccttaaccccaactcagggcgtcgggtcgtgcttgaaacggataaccggggctatatggaactgaaccgcatgtggctacacgacgacatgccccgcaactctgaatcacgggctatcagctacgcgctgaaagttatcaggttactgtatccgtcagttgagtgggttcagtcttttgcagacgaacgctgcggacgtgctggcgtggtatatcaggcgtcgaattttgattttattggtagccatgaaagcacgttctacgagctggacggcgagtggtatcacgagatagcgatgaacgcgattaagcgcggagggcaacgaggcgagtatttgcgggctaataaggagcgggccgtggtacacaaatttaatcagtatcgctacatcaggttcctgaacaagcgcgcaaaaaagcgcctaaacaccaagctattcaggattcagccatacccgaagtgatcttacttaatgaataaaaaagcagcggccaatgccgctgtttcgtttgaagcgcgaaaattaaagttttcgcatttatcgtgaaacattttcgcgtttttcgtgcgccgcttcatccggcaggaggatcagatctttttcttccgccagcaagtattcggcatgaccgccgtcacgctgccagccgtaagccgcttttccttcgccagtacaagaaataggaaaaccgcgacggcagttcgggcaaaaaccacagccagaaatgtgatacaccagcacgcggtcgccctctttaaaatggcggcagccttgccccatcgccacaatctgcccgcacggttcatgaccgttgataaagccctggtataacggtttatcgggtgccgccgctgtggcacggtgttgatgatagatatagtggacatcgcttccgcaaatcccggaggatttcattttgatcagtacctggttaatccccggcgtcggcaccgcaacttcccgcagatcgacggtcgaatttcctggtaaataagctgccagcatcgttttcataaatccctcattaacaatacgattaattttcatccctgccgcacccgcgccaggggcgttaaggtttagcgtttcgctttactgcttcgctgggtcagcaagatattcgccagcaccgccaccacgatgatgacgccgcgtaccacctgctggaaaaaggagttaataccgagcagcaccagaccgttaccgattagcgtaatcaccagcacaccaagcaatgtaccgaacagggaaccgcgaccgccggaaagtgccgtaccgccgaccacgaccgcggcgatgacgtcaaactccagaccgtttgcggcacctgcgttaccagaaccgaggcgcgccgccaacaaaatgccggtcaccgccgctaataatcccgaaagggtaaagataagaatgcgcacccgacgaacgttgatgccgcacaactgcgccgccgtagcattaccgccaacggcaaaaaccgagcgcccgaaggcggttttgcggctgatgaacacaaacagcgcaaacaacacaatcatgatcagcgcggataccggcacaccgagaaattgtccgcccagccagtccagcacctcgttttcatcaatcggcactggcagtgcgttcgtcataaacagccccattccgcgcagggcgctccacagccccagtgtggcaacgaaacttggtacattaaacacgccgcgcagcaccccggccagcgttcccatcagcgcgcctaacagcaacaccagtaggcacgccaccgccagcggaacttcaaattgcagcaaaaatgccaggcacaccgagacaaaagccaccatcggcccaacgctgacatcaatttcaccggagataataatcagcgtcatcgcccaggcggcaatcccaatggtggcggcatcgcgcagcacgttcatctggttattcaatgagataaagccaggcgcgttcagggagaagaccagataaagaatggcaatcaccaccagcaaaccgatctcattaatatggcgactgacaaattgtttgagcgagacgctcttgccctgcggcaatggtaatgacgaagcagacatcttcaggttcctcggtaaaattcatcagtgcacagacagaatggcggacatcagctcatccacattgaccggagcgtgaaactcctgcgagaacgtgccgtgctgtaataacaggatgcggtcacacaccagcggcaactcctccacttcactggagataaacaccacgctttttccttcggcagccagctcacggacaatacggtaaatctgctgtttggcttcgatatcgacgccgcgcgttggctcgtcgagcaacaaaatctggctggcagcatagacccaacgaccgatcaccactttttgctgattgccaccagaaagcgtgccgatgggtgtttcgctactggcggccttgaccgtcatccgctgcatcacctcttcggtcaggcggcggatggtggaccattgcagcacaccgttggcgctgattttttgccgattggtcagcactgtattttcgtcaacgcccaaccagggaatgatccccgcttctttgcggttttctggcgtatagccaatgccgcgtttcagcatgtcgccgtaatcggggcgcgtgattttctcgccgttgataacaatttcgccctgttcatactcctccagcccaacaatcgccttcagcaattcactgcgccctgcccccagcagaccagcaatgccgagcacttcgccacgacgtagcgtaaaactgatatcctccagcttgggcttatggcgtaacgcacggacttccagcacggcctgatccacaatttcctgaggggctaccggcgcaatatcaacgtgatcgcgcccgagcatcagcgacacaatatgatgcgtggaggtgttttcgagcatcacatcgcccgccacctgaccatcgcgcataacggtggcacaggaggcaatgcggcgaatttcttccatccggtggctgacataaatcaccgccacgcccagtgccgacatctttttcaccgcgctgatcaccagttcaacttccgcactcgcaagcgaactggtaggttcatcaagaatgaccacgcgcggctcgcccttcatcacccgcgcaatttccaccagctgcttttgcgccgggcttagcgttgaaacaagttgttcaggactaacgtcaacgcccagcgcctgtaagcaacgttgggcatcctgcgccatttgcaggtaatcaatcatgccgttgcggcggggccactgaccgaggcagaggttttccgccactgtcagcccttccaccagacttaactcctgataaaccgcgcgcacccccagttcagcggcacggcgagtcagcgtagcttcgtcaccttccagtcgcgtctcgccaatccagatatcaccgctatccgggcgttcgctgccggtaagcattcgaatgagagtcgatttgcccgcgccgtttttacctaacagcgcacgaacttcgcctttattgagcgtgaagttaacgttatccagcgcaacgacgccgggataacgcttatttcctgccaccacttttgctaccgggactgcctctgttgccgtgaacatagggacctctgcgaatcagcgattagggcagaccatcaacgtgcgttgccagccactgtttaccgtcttccgttttggtatagagatcgataggcacctgaatcactttttcaccgtcggcttgtttattgataaccttcaatgtttgcgcgaaaacagcattgcccattttcttaccggaaatatccactaccgctttcagcacctgattgttttccagctcctgagcaatttcggttgtcatatccgaaccgaaaacagcaatttttccggcctgattttgattacgtaccgcttttaccgcgccgagtgtcgcaccgcccgattcccccataatggcgttgagatccggcgtggagataattagtttttcaccaacggaaatcgctttatctaaaacagtcccttcctgattagcgacaatttgcgcgccgggaacgcgggattttaaaacttcttcaaatcctttacgtcgctgcacacaaacttcaaaggcttcgcaattgatgacggcaattttcggctggtcaactttattggcaataaaataatcagcggcagcgttacccagttttttaccaaattccagcggatcgccgaccagatacgccgagacatatttatcgacccccttttgattaatacaggtgttgtagcaaatcaccggaatgcccgcttcactggcgcgacgaacggtacggctactgccattttcagacactgccgataaaataatggcatcgacattacgcgccacgagggtatcaacaaaggtactttctttcgaaatatcaccctgggcgttagtttctattaactgaacttgtactgaggaatcttttgccgcatcctgaacgccctgacgcactccagcgtagtatccctgagtatcaaggtatattgcgccaatggtcatttctttttccgcagccctggcaaatagtgcgctacctaatagcgtagccattaataatagattacgggttgttctcatttttgtaggcatagagcctcctgtagggtttttattaacaacggcttattctaattattttgtgatgagcggcagcgcgtgccgctcaaatattacagttaatagggtttagtgaacgcggttaaaaataaaaggcatcacggtggtgaataatgccgctttcggccaagccggattaatcgccgtcaattcagcgcgagcagactcatattgcgcaacctccccgagtcccgcggacgccagcatcgccaccatcaggcatttttctttatgctgctgttgtaaatcgccatacagcgacaacaagtcaggttgcgagacggcaaagaaatccgcttcgatactggttttcgccatctcttgcgcccactgtttcatttcactaaacagttgctgtgcggtttgttgttcgcccagcagtcgcagcgccatcccttgccagaagagataatcaaccggctgatcgttgtaataactgtgaatgttaatagtgcgatcgccggtcgccgccagacgtaaacaacgcgtcgcttcagtttcatcgccctgcgcgttggcgcatatcgcctgccagaaccagatgtcgttatcagtttgccccggtaaacggccttcgcttaaattctccggataatgcagcgcggcatgaagcagttcgcaggcctgctgcggctgtctggcatcaagatgctgccaggcgcgtaataactggttgaggataaactgactggtgaccttcccttccccgccttcccacgggtggaatttgcgcgtggcgagaatgtccgccgctttgtctgcctgacccgtgagatgccacaaattgagcagttctgcggtcatgtcgtcgcgtttcagcgcaatttccagattattttccagacgcgccagtcgtttctccggtgtggctccacttaacttatccagcaaatcccgttcgaaaagcagacgtgcatcctgcggcgcaagctgataagcattatcaagataacgcgcggccagctcataatcgtgttgcttattccacgcatggatcgctaacccgcgccagccgtcggcaaactccggcgacatctctacgcaacgttgccaaaaggcaatggctttgttgtagctacgtttgttgtagtagaagcaagctagtaaatggcgagcaaaccagcactcttcaatactctccagcgccgccacttcttccagcgtattcgggaaacggacaaactgcgggaagacatcaatggcttttgcgaccagttcgccacgttcggctttcggcagcaagctggcttgcaggtaaagcggcagcgtgcgctggcagtccagtgcgttcagcatctctgccgccagggtgggcattccccagttaatcagttgcccggcggtcatcagggcgttaacgtcgcgtccctgacacagaccgcgccactgcgcgagagctgattcgctacgaccatcgaaccagttcagccaccacagagtggcgttcagcggataatcgcgcagcagtttctcgcgctgcacacgcgcgttgtcctgacgaccacttaacaccagcagcagattatgcaggcaaagcacttcctgattggttgggcaggcgcgaagactttgttggcaaaaatccagaccagcgtcgaagttaccattacgcgccgccagtcgtgccaggccataatagccaccggctttgctgttgccgctccagaccgcacgccagaaatcctcttcggcttgttgatattgtccctgacgttcgtaagcactggcgcgaatcaaactcgcctgtccgcactgcggatttttgttcagcgaatgtgcgcgtttcagagcctgagtggcatacgccaccgcttgcgggaaatctgcgcggttatattccagcatcgccagcgccaggttacagcgataatccagcgggtccagcgccacgccgcgcaggtagtaatcgaacggtgaacggctggcgtgatgatattgctccagatgctgaccgataaaccaggcttcatctgtactggtaatgtcttgtgctgccagtggcgctttggcgacgtccggtaacggcaacgcttgcggctgatgttcctgataactcagtacaatattgccgtcggcatcggagagctcaatggtcagcctttcaggattgataccgtgcaacacgccctggatggcggtcgcaggcatcagtgccacggcatcatcaagtaacgcgttgcatttaccgatttcgcggatcgccaggcggtatccgttcaacggagagatggcatacagcccccactcaatcccccgcttactacgctggagttttatcaccgcatcgcgggaggcattttgcaccatgcccaaagaatgataaggcaggaaatactgctcaaaacgcttctcttcgtaagcatcaagccaggtaaaatcgggctggttatcggcaaaaataccggtcatcagttcgatatacgggccgttattgtcggtcagactcttatcccacgcctggccaaattcactgtgtccccaactccactgttttttacctggcgcaatatggtggttggcaacgtgcagcaaaccgccatcttcatcgtgacaccacgcgccgacaaaatcgtactgcgatttttcggccatatatgaggttggaacaggcacatttttatagcgagaaatgtccactccagcggagtagtccactttgtagtaagtgccggtagcgatggggaaagcggagacggcccgtttgccgtgatcaaacaccgccgttacatccggcgggaagacgctctgatgcccttccccccctttcactgccgggttggcccaccacaagaaatgacgcggcgtggcgttcccgttatagacgcggctggcgatttccagcgccgcccggtcagggcgcagggtgaaacctgtcatcacctgtaaaccatgcatcggctccgtttcgcctacccacaccgtctgtgcaccgtcttcatgggcttcgagggtgaaatcaacgggcataaaggtggtcgggcgatgatgttgcggccagttaaactcaatcccaccggaaatccacggccccagcagccccaccagcgcaggtttaatgacttcattgtgataaacaaaatcgcgctgtttcactttatcccacgcgcgatgcacccgaccgcccagttccggcaggatcatcactttgatgtagtcgttttccagccacaccgcctgccaggatttcagggttttctgctcgctcagcgtatcggtcacgccgtagggataaaccgcgccggacgatccctgataaacgcgattttccaggaacatgggatgtatatcctgcggcccggtttcataggtcgggatctcaacgcgctcttgccacacttttactggagtcatggtgccctcaatattaacaagacatactgaattaaaagatttgtggcagtgtattgaacaatctggcaatgttttcgcggaataatcacgcaattaactaaacaaggtttagtgaagatgagagcctgcattaataatcaacagattcgccaccataacaaatgcgtgattctggaactgctgtaccggcaaaagcgcgccaataaatcaacgctggcccggctggcgcaaatttcgattccggcagtcagtaatattttgcaggaactggaaagcgaaaaacgggtggtgaatattgacgatgaaagccagacgcgcgggcatagtagcggtacatggctgattgcgccggaaggtgactggacgctgtgcctgaacgtgacgcccaccagtattgagtgtcaggttgctaatgcttgtttaagtccgaaaggtgaatttgagtatttacagattgatgcaccgacgccgcaggcgctgctgtccgaaatcgaaaaatgctggcatcgccaccgtaaattgtggccggaccataccatcaacctggcgttggcaatccacggtcaggttgatcctgtgaccggcgtgtcgcaaaccatgccgcaagcgccgtggacaacgccggtggaggtgaaatatctgctggaagagaagctcggcattcgggtgatggtcgataatgactgcgtgatgctggcgctggcggagaaatggcaaaataattcgcaggaacgggatttctgcgtgatcaacgttgattacggcattggctcgtcgttcgtgattaacgagcaaatttatcgcggcagtttgtatggtagcggacagattggtcacaccatcgttaatccggatggcgtcgtctgcgactgtggacgttatggctgcctggaaaccgtcgcctcgttaagcgcattaaaaaaacaggcgcgggtatggctaaaatcacaaccggttagtactcaacttgatcctgaaaaactgactacagcgcagttaatcgctgcctggcaaagtggagaaccgtggatcaccagctgggttgatcgctctgccaatgccattggtttgagtctgtataacttcctcaacatcctcaatattaatcagatttggttgtacggtcgcagttgtgcctttggtgagaactggcttaatactattattcgccagacaggatttaacccgttcgaccgcgacgaaggaccgagcgtgaaagcgacgcaaattggctttgggcaattaagccgcgcacaacaggtgctgggaattggctatttgtatgttgaggcgcagttacgacagatttgatggcgcgataacgtagaaaggcttcccgaaggaagcctttatgatcataaacgaaaaattgcctgatgcgctacgcttatcaggcctacacggagattgcaatatattgaatttgcaaagttttgtaggccggataaggcgttcacgccgcatccggcatgaacaacgagcacattgacagcaaatcaccgtttcgcttatgcgtaaaccgggtaacgtgcgcagatgtcgagaactttacctttgatgcgctcgataacggcttcatcattgatgctgtccagcacgtcacacatccagccagccagttctttcgcttcggcttctttaaagccgcgacgggtaatcgccggagtacctacacgaataccggaggtcacaaacgggctcttcggatcgttcggtacgctgtttttgttgacggtgatgttagcacggcccagagcggcgtctgcttctttaccggtcaggtttttatcaaccagatcaaccaggaacaggtggttatcagtgccgccggaaaccactttgtagccgcgctcgaggaacacttctaccatcgctttagcgtttttagcgacctgctgctggtaagttttgaactcaggctccatcgcttctttcagagcaaccgctttaccggcgattacgtgcatcaacggaccgccctgaccaccagggaaaacggcagagttcagttttttgtacagctcttcgctaccacctttcgccaggatcaggccgccgcgcggacccgccagggttttgtgagtggtggtagtaacaacgtgagcatgaggaaccgggttcgggtagacgccagcagcaaccaggcccgcaacgtgcgccatatcaacgaacaggtaagcaccgatgctgtcagcgatttcacgcattttcgcccagtccaccacgccggaatatgcagagaaaccaccgataatcattttcggcttgtgttctttggcttgtttttccagatcggcgtagtcgatatgaccggtagcatcgataccgtaaggaacaatgttgtacagtttaccggagaagttaaccggagaaccgtgagtcaggtgaccgccatgcgccaggttcatacccagaacggtatcacctggttccagcagcgcggtgtagaccgcaaagttagcctgggagccggagtgcggctggacgttagcgtagtcagcgccgaacagttctttcgcacgatcgatcgccagttgttcaacgatatcaacatactcgcaaccgccgtagtagcgtttgcccggataaccttcagcatatttgttggtcagctgagaaccctgcgcctgcattacgcgcgggctggtgtagttttcggaggcgatcagttcgatgtgctcttcctgacgtactttttcctgctccatagcctgccacagttcggcatcataatcggcaatgttcatttcacgctttaacatccgcatctcctgactcagctaacaataaaatttttggcctttataggcggtcctgttggacaacggcgaacagtataaccgaatcattgtgcgataacaggtcttgacaaaggaatttacgcaaacgattaccttcaggctacgcaaggctttggagaataaagagcttgcaaccggaaacggatttcttttcaggtttgtgatgcaaatttttcacttcatcacattctttctgaaaaacaccaaagaaccatttacattgcagggctattttttataagatgcatttgagatacatcaattaagatgcaaaaaaaggaagaccatatgcttgacgctcaaaccatcgctacagtaaaagccaccatccctttactggtggaaacggggccaaagttaaccgcccatttctacgaccgtatgtttactcataacccagaactcaaagaaatttttaacatgagtaaccagcgtaatggcgatcaacgtgaagccctgtttaacgctattgccgcctacgccagtaatattgaaaacctgcctgcgctgctgccagcggtagaaaaaatcgcgcagaagcacaccagcttccagatcaaaccggaacagtacaacatcgtcggtgaacacctgttggcaacgctggacgaaatgttcagcccggggcaggaagtgctggacgcgtggggtaaagcctatggtgtactggctaatgtatttatcaatcgcgaggcggaaatctataacgaaaacgccagcaaagccggtggttgggaaggtactcgcgatttccgcattgtggctaaaacaccgcgcagcgcgcttatcaccagcttcgaactggagccggtcgacggtggcgcagtggcagaataccgtccggggcaatatctcggcgtctggctgaagccggaaggtttcccacatcaggaaattcgtcagtactctttgactcgcaaaccggatggcaaaggctatcgtattgcggtgaaacgcgaagagggtgggcaggtatccaactggttgcacaatcacgccaatgttggcgatgtcgtgaaactggtcgctccggcaggtgatttctttatggctgtcgcagatgacacaccagtgacgttaatctctgccggtgttggtcaaacgccaatgctggcaatgctcgacacgctggcaaaagcaggccacacagcacaagtgaactggttccatgcggcagaaaatggcgatgttcacgcctttgccgatgaagttaaggaactggggcagtcactgccgcgctttaccgcgcacacctggtatcgtcagccgagcgaagccgatcgcgctaaaggtcagtttgatagcgaaggtctgatggatttgagcaaactggaaggtgcgttcagcgatccgacaatgcagttctatctctgcggcccggttggcttcatgcagtttaccgcgaaacagttagtggatctgggcgtgaagcaggaaaacattcattacgaatgctttggcccgcataaggtgctgtaatttgatgttgccggatggaaacatccggcaacccttgacgcggtttaaattgccgcgtcgtcctcttcaccggtacggatgcgaatgacccgtgccacgtcaaagacgaagattttaccgtcaccgattttgccggtttgcgccgtgcgaataatggtatcgacacaggtatcgacaatgtcgtccggtacgacaatctcaattttcactttcggcagaaaatccaccatatactccgcgccgcggtacagctcggtatggcctttctggcgaccaaagcctttcacttcggtcaccgtcatgccggtaataccgacttcggccagtgcttcgcggacatcgtccagcttgaagggttttataatcgcatcaatctttttcatgctattccttgaaaaggtcgcctgtcttttgatctgctaaacgtaacacataacgccaattcattccttgaaatcgtttgcatccagctcgtgtcgggaaagcagtttataaaattctgtccggttgcgccccgccattctcgccgcgtgggtgacgttgcctttggtgatttgcagcagcttacgcaaatagttgagttcaaactgattacgtgcctcaacaaaggttggcagcgccgtattttcaccctccagcgcctgctccaccagcgcatcactaatcaccggagatgaggtcagcgccacgcactgttcaatcacgttgaccaactggcgcacattacccggccagctcgcggtcatcaggcgtttcatcgcatcggtagagaacgcgcggacaaacggtttatgtcgctctgccgcctggcgcaacaggtgatttgccagtagcggaatgtcttctgtgcgctccgccagtgccggaattttcaggctgacaacgttgaggcggtaatagagatcttcgcggaattccccgcgcgccatcgcttttggcagatcacggtgagtggcagaaataatccgcacattgatatcaatatcgcggttactgcccagcgggcgcactttacgctcctgcaacacgcgcagcagtttgacctgtaacggcgcaggcatatcgccaatttcatcgagaaatagcgttccgccttccgccgcctggaataaaccttcgcgattgctgacagcgccagtaaacgcgccacgcgcatgaccaaacagctccgactccagcaattgctcgggcaatgcgccacagttaatagcaataaatggtttgctgttgcgcgggctggcgttgtggatagcctgggcgaaaatctctttcccggtgccgctctgaccgttaatcaaaacgctgacgtctgattgcgccaccagccgcgcctgttccagcaaacgcagcatcagcgggctgcgggtgacaattgcctcgcgccagcgttcatcggtggctggcgcggattgctccagcgcatcgtcaattgcctgatatagcgcgtctttgtcgacaggcttggtgaggaaactaaaaacgccctgctgtgttgcagcaacggcatcgggaatagaaccatgcgcggtaagaataattaccggcattcccggctgcactttctggatttcagcaaacagctgcataccgtccatttcatccatccgcaggtcgctgatgactaaatctactttttcgcgattcagtacccgtaatccttcagcgccactttccgccgtgaccacactgtagccttcgctggtcaggcgcaggccaagcagtttcagcaatcccggatcgtcatcgaccaataataaatgcgcaggtttatggctcatcaggagtgacctcatgggtggatggcgcgggcttttcactctcgtgcggcgtatccggcgagaaatttccagccggtttgcgggtcgagagctggcgttcaatatcggtcaggttttccagcttgcgggtggtgagttccagttgctgctgtagaacgtgatgttgctggcgcaatgtatccagctcgctgtcgctggactgctggagtttactgtaacgttggcgctcttccgccagttgcagttgcagcgcctgaccatcgcgccagagttgatacagtgggcgaacctgtgccgggatctcggtacttaacgcttcaatacgcgcgaccagctggcggcgctcatacggcgtaattttggcgtcggcgagcaaaatcccttgtttaaaggtattttgccagctgccgtcgtcatattggcgagcttgctgacgcgactgcgcaggcattaaacgatcagcacaatccatcgcccgcagccagtaaagcggattggtttcggttgatttaccttgcagcgcccagatgtcgctacattcagtagaaagatagtcagccagttgataaaccggaattttttcttctgctggcgtatcaatggctggcttattgtgattctgcacgcaacccagcaatgccagacatggcagccctgccagccacagccgtcggggcaataatcgttgaaaaatgtgtcgcatattcaccagacttaaagcctatcccagtgggcgtaattgttgcagacagtctggacatggacagcgcggagaaaccggagcgtacatatcgtacgtgaagatttcgagcactgcccggggccgaactgacaaataaaatagcctgataggataggctgttagcattatttcgtgtttttcgacgacggtaattcaatgcggaaacaaacgtcttgcccgctctcgtcgaccagatacagttccccttgcatacggcgaatacaatccctggcaatgcttaatcccagaccgctgcccttcaccgccccttttcgctggtggcttccctgaaaaaagggttcgaagatcatggcgcgttcctcttgcggaatgggcgtgcctgtattgatgacatcaatataaacccgcgcaccatgtaaactgctgcgaaggcaaatgttaccggattcagccccgtagtgcaccgcattggagtaaagattatccagtacgctcatcagcagcattggctccgccaggcaagctgttgctttgagatcgacgtcggtatgcatcattttagcccgtgcgggcaggctatgagcagaaaccactgtctccaccagcggtgctaactcaacattctccagttccaccgcactgtccgcctgtttacggttgtaatcaagcagttgttcgatcagtttttgcaaattgcggctgctgctatcaagaatgctcaccacctctttttgctctggcgtaagcggcccgacaacctggtcagccagtaattcagtgccctcgcgcatactcgccagtggcgtttttaattcatgagataaatgtcttaaaaattgatggcgttgggattccagccatgacaggcgctcacttaaccaaagaatacgttgcccaaccgagcgtaactcgctcggtccactgaacgagacgctattgcccagagaacgcccttcccccagacggttgatcatgcgctcgatatttttcaccggcccgataatcatccgcgtgaaaagcagtaccattaccagactcaccagaaatagcaccagcgattgccaaccaaaatattgcccacgttcggcgatttcacgctgaagctgctgcccacgagagaacaccactgtgcgcgtggcctgtaccatttcggtattggcactggcaaaggcttcaagacgtgcggcggcggcagcatcgggaccgctgttgttacactgaagttgagccagattgtgcaaatcctgacgtaatgcctggtagagtttatcgtccggcagcacgcctgcgtgggcatcgagcatttcgctgtaacgcttgcgctggctttgataaaccttcgccagggttgggtcgtccagcacgcaatactgacggtaactacgctccatctccagcgccgcgttggtcatcgcttcactgcgccgggcatcaataagcgtagtgcggttaaccagcgccgcctgatcgctaagcgcattcaggctttgccaggcttgccatgccagcaccaacaggggcagcagaatcagcaaaaatgccagcattaccagttgtcgtaatgagcggggaaaaacgggccagcgtttcaaggtgttactctcgtcagacgcgaatagcctgatgctaaccgaggggaagttcagatacaacaaagccgggaattacccggctttgttatggaataaggcggtgcctaactcgacgtttcgcccgatggttgatatagctacgctgatatcagaagttggacggcaggcaccttgttgtgcgtcattcgtattttatgtagcacgtcccgaaggggctgacataagtcggtgaatgagccactggttactattatgcagtaactgtgccaacaaagaaaatagtttggtaacgtactgattatacgttgctttgaggggtttatgtctcctccgctgtttgaatgtaaatcagccactgtgtcgctaaaaagagacaacttaagataaacttattagataatattaaaatcaatgagttaagtgtcgccagaaagcgacacggcaaaccacccattgtcgtgatttacagacacaaaaaagctcccggagttgggagcttatgatagtggttggtgcttaatgccgcatccgggctgcaaaaccaatgggctgacgacttaccccaactgcttacgcgcattgcggaaaatgcgcatccatgggccatcctcgccccagttttccggatgccaggagttgctgacagtacggaaaacacgttccgggtgcggcatcataatggtgactcgaccactttcagtcgtgactgccgtaataccgttcggtgaaccgttcgggttagccgggtaggtttcagtgactttgccgaagttatcgacatagcgcagtgccaccagccctttgctttccagtgccgccagatgcgccgcatcacgcacttccacgcgcccttcaccatgagagacagcaatcggcatttgcgagcccaccatcccctgcaacagcagagacgggctttgggttacttcaaccaggctgaaacgcgcttcaaagcgatcggaggtattgcgcacaaaacgtggccacaactcactacctgggatcagttcacgcagattagacatcatctggcaaccgttacatacccccagcgccagcgtttgcggacggtggaagaaggttgcaaactcatcgcgtacacggtcattgaacaggattgacttcgcccaaccttcaccggcacccagcacatcaccgtaggagaaaccaccgcacgcgaccagggcgtggaaatcttccaggcccgtgcgtccggtcagcaggtcactcatatgcacgtcgatagcatcaaagcctgcacggtggaaagctgccgccatttcaacatgcgagttcacgccctgctcacgcagtacggcaactttcggacgtgcgccagtggcaatatacggtgctgccacatcttcgttgatatcgaacgacagttttacattcaggcccggatcggcgtcgttagatttcgcctgatgctcctgatcggcacactccgggttgtcacgcaggcgctgcatctgccaggtagtttctgcccaccagacacgcaacgtggtgcggctttcgctgaatacagtctgcccgttggcggtaatcacaaaacggtcaccggaaaccgcctgccctacataatggacacaatcagcaagcccatgctgtgccagtacggactcgaccgcttcacggtcagcggcacgaacctgaatcaccgcacccagttcttcgttaaacaacgccgccaggcgatcgtcacccagagtggcgatatccgcgtcaatgccacaatgaccagcaaaggccatttccgccagcgttaccagcaggccgccatcagagcggtcgtgatacgccagcagcttacgctgtgcaaccagcgcctgaatcgcgtcatagaagcctttcagttgcgcgacatcgcgtacatctgccggtttgtcgccaagctgacgataaacctgcgccagcgccgttgcgcccagcgcgttattgcctttgcccaaatcaatcagcagcagtgcgttatcttcggtagaaagctgcggcgtgatggtgtgacgtacatcttccacgcgggcaaatgcagaaatcaccagcgacagcggcgacgtcatttcgcgctcttcgttaccttcctgccagcgggttttcatcgacatggagtctttacccaccgggatcgtcaggcccagcgccggacaaagctcttcgcccacggctttaacggcttcatacaggcccgcatcttcaccagggtggcctgccgccgccatccagttggcggaaagtttgatgcgtttgatatcgccaatttgtgttgcggcgatgttggttaacgcttcaccgaccgccagacgggcagaggcggcgaaatccagcagcgcaaccggcgcacgctcgccaatcgccatcgcttcaccgaagtagctgtcgaggctggcggtagtgaccgcgcagttagcgaccggcacctgccacggccccaccatctgatcgcgcgctaccatgccggttacgctgcggtcgccaatggtcaccaggaaggttttttccgccacagtcggcagatgcagcacacgtttcaccgcgtctgcaatggtgatcccttcacgggccagcgcgtcgcctttcgctttcagcgtttgtacatcgcgggtcatcttcggcgttttaccaagcaggacgtccagcggcagatcgatcggctgattatcaaaatgacgatcgtgcagagaaagatgcagttcttcggtcgcttcaccaatcaccgcgtagggtgcgcgctcacgcttacacagttcgtcaaacagcggtaattgatcggcagcaaccgccagcacgtagcgttcctgggattcgttacaccagatttccagcgggctcatgcccggttcgtcgcttagaatctcgcgcagttcaaatttaccgccgcgcccgccgtcgctcaccagttccggcatggcgttagaaagaccgccagcgccaacgtcgtggataaacaggattgggttggcatcaccaagctgccagcaacggtcgatcacttcctggcagcgacgctccatctccgggttgtcgcgctgtacggaagcaaagtcgaggtcggcatcagactgaccagacgccatagaagacgctgcaccaccgccaagaccgatgttcattgccgggccgccgagaacgaccagcttcgcaccgacgttgatctcgcctttttgtacgtgatcggcgcgaatgttgccgatcccgcccgccagcatgatcggtttgtgataaccgcgcagctcttcgccgttgtggctgttcactttttcttcataagtacggaagtagccgttcagtgccggacgaccaaattcgttgttaaacgccgcgccgcccagcgggccttcggtcatgatgtccagcgcggtgacaatgcgctcaggcttaccgaaatcttcttcccacggctgttcgaagccaggaattcgcaggttggaaacggagaaaccaaccagacccgctttcggctttgcgccgcgcccggtggcaccttcatcgcggatttcaccgccggaaccggtcgccgcgcccggccacggagaaatcgccgtcgggtggttgtgagtttcgactttcatcagaatatgcgccggttcctgatggaaatcgtagcggcccgtttcgtggtcagcaaagtagcggcccacttcagaaccttccattacggcggcgttatctttataagcagagagaacgtgatctggcgtggtttcgaaagtatttttgatcatcttgaacagcgatttcggctgctgttcaccatcgataacccagtcggcgttaaaaattttgtggcggcagtgctcggagttcgcctgggcaaacatatacagttcgatgtcgttcgggttacgaccaagctttgtgaaagcatcctgcagatagtcaatttcatcttccgccagagccaagccaagacgcaggttagcgtcgatcagcgcctgacggccctgccccagcaaatcaacgctggtaaccggagtcggttgatggtgggcaaacaactgctctgcatcatctaaagcaaaaaagaccgtttccatcatgcggtcgtgcagttcagcggtaacctgctgccattgttcattggtcagcgtaccggcttctatatagtaagcaacgccgcgctcaaggcggtttacctgttgtagcccgcagttatgggcaatatcggtcgctttcgaagaccagggagagatggtgccaggacgcggggtcaccagcaggagtttgccttgcggggcgtggctggcgagtgccgggccatatttcagcaggcgttcaagttgtgcgtgctcatcatcgtttaacggcgcattgaggtcagcaaaatggacatactcggcgtaaatattgtgaaccgggagcctggcagcctgaaaacgtgccagcagtttgttgattcggaatgccgacagtgcaggcgaaccacgcagaatttccatcataagtctctcgtcttctaagctttcggtgtacccaagggggggaaacgggcgtcattataaagaatctgatgcgctgacgaaaccgtttgcgtggaaataaaatcaccatcgtgaattagcaacgcgtgccgccaatggctgtaataagttgccatctggcgcaggtttacgcaaaatgccgctcatttatgagtaaacctttcactattattacgttttttcaagctgggacgcgcacgacacagagaattaactaattgaaaaaattaaagattaattatctgttcatcggcattctggcactgctgctcgcggtcgctctctggccatccattccctggtttggtaaagccgacaaccgtatcgccgccattcaagcgcggggagagttgcgtgtgagcaccattcatactcccctgacttataacgaaatcaacgggaaaccttttggcctggattacgaactggcgaaacagtttgccgattacctcggcgtaaaactgaaagtgaccgtgcggcagaatatcagccagctgtttgacgaccttgataatggtaacgccgacctgctggcggcaggacttgtctataacagtgagcgggtaaaaaattatcagcctggccctacctattattccgtgtcacaacaactggtttataaagtgggtcagtatcgcccacgtacgctgggcaacctgacggcggagcaactcaccgttgcaccgggtcatgtggtggttaacgatctccagaccctgaaagaaacaaaattcccggaattaagctggaaggtagacgacaaaaaaggctctgcggaattaatggaagatgtcatcgaaggaaaactcgattacaccattgctgattctgtcgccatcagcctgtttcagcgcgttcacccggagctcgccgtagcgctcgatatcaccgatgaacaaccggtgacttggtttagcccgttagatggcgataataccctttccgccgccctgctcgacttcttcaacgaaatgaatgaagacggtacgctggcacgcattgaagagaaatacctggggcatggcgatgattttgattacgtcgatacgcgcacatttttacgcgccgtcgatgcggtactgccgcagttaaagcccctgtttgagaaatacgccgaagaaattgactggcgtttgctggccgctattgcttatcaggaatcgcactgggatgcacaggccacttcaccgacgggtgtgcgcggcatgatgatgttaaccaaaaataccgcgcaaagcctcggcattacggatcgtaccgatgccgaacagagcatcagcggtggcgtgcgttatttgcaggatatgatgagtaaagtgccggaaagtgtgccggagaacgagcggatctggtttgccctcgctgcgtacaatatgggctatgcgcatatgctggatgcccgcgccctgacggcaaaaaccaaagggaatcctgacagttgggctgacgtaaaacagcgtctgcctttacttagccagaaaccctattacagcaagctgacttacggctacgctcgtggacatgaagcctacgcttatgtcgaaaatattcgtaagtatcagattagcctggtgggttatctgcaagagaaagagaagcaggctacagaagcggcgatgcaactggcgcaggattatccggcggtatcgcctacggagttgggcaaagagaaatttccttttctctcgtttctttcccagtcgtcatcaaactatttgacccattctccctctctgctgttttccaggaaagggagtgaagagaaacaaaattaatccgtcgaggattgcgcttttttctgcgctttaatttcctggcggcgcatgcgaaagaagtcactgagcaacgccgcgcactcatccgccagtattccttccgtaatttccactcggtgattcatacccggatgatgcagcacatccattaaagatcccgcagcgccagttttcgcgtcacgcgcaccaaagaccacgcgaccaatgcgactgtggatcatcgctccggcacacattacacatggttcaagcgtgacatacaacgtggcgtcgatcagacgataattttgcatcaccagaccaccctgccgcagggccatgatttctgcatgtgcggtgggatcatggcgaccaatcgggcggttccagccttcgccgattacccgattgttatgcactaataccgcgccgaccggcacttcccgctcatcccaggcacgtttcgccagcgtcagcgcgtgacgcatccagtattcgtggctaaattcgacttcagacaaaaagaaaactccggttataaaagcgcggcgcattatacacggacgctatgctttactctattccagttgctggagttcaccgcgcggggttactcgccaacgatgctgacagaaataaagcagcggattgtcctgattactgtcgctatagccactgtacagccgcagcggagtgccgattttgcgctccagttgtgcgaccttttcatgtcccagacaacgcatcgtcaatacccaaccaccatagccacgctgaatttggctggcgataagattaacccgcggcagccagggcgtatcgaaataaaccgcttcaaccagcggctgcggagagccggtaatcaaccagatatcagcatcggaacttaacaggtaggtggttaatcgctcctgaaccagcggaaaggcggtaacattgtcgcgaaaccagcgcacgaaatcggcctgcaacgtctgtaaacgtgcttcgctgtgaccaaaagtgcacccccacagaagcagactcatcggccagcgtgccgcacgaccttttatcaataacgcaatggctataatcggtaacaacggcaggacaagtaacgcattcagcggttggcgacgtagtaaatagcgcagaaaactgccgaacatatcctgctgatgcaatgttccatctaagtcaaaaaacaccacacgacgctcgtgagttgccaaaccatactcctctggactgaaacatcctgattaattttcgctactacatagcctaacagatagatcatcacttttccggcaacaatcgaccgcatcatggctaactggaatttttaattcatggcaattagcggcaatggaatataaaattcactcgcgtgtgtctcatattgcctgttgtcgccactatttcatcgcgaggaaagatatgaacggcttacttcgtatccgtcagcgttaccaggggcttgcccagagtgataaaaaactggcggattatctgctgctacaacctgatacggcgcgccatttaagctctcagcaactggccaacgaagccggagtcagtcagtccagcgtcgtgaagttcgcgcaaaaactcggctataaaggttttccggcgcttaagttggcgttgagtgaagcgctggcaagccagccggaatcaccctccgtgcccattcataaccaaatccgcggtgatgatccgttacggctggtcggcgaaaaactgattaaagaaaatactgccgctatgtacgcaacgctaaacgttaatagtgaagagaaactgcatgaatgcgtaacaatgttgcgctctgcgcggcggataattctgaccggtattggcgcttcgggtctggtggcgcaaaactttgcctggaagctgatgaagattggcttcaatgctgccgcagtgcgcgatatgcatgcgctactcgcaacagtacaggcgtcgtcccctgacgatctgttattagccatttcctacaccggtgtacgacgcgagttaaacctggcggcagatgagatgctgcgagtgggcggaaaagtgctggcgattaccggctttactccgaatgccctgcaacagcgtgcttctcattgcctgtataccattgccgaagaacaagcgacaaacagtgcttcaatctctgcttgtcacgctcagggaatgttaacggatttgctgttcattgcgctgattcagcaggatctggaactggcaccagaacgtattcgtcatagtgaagcgctggtgaaaaaactggtctgagtaaagaatgcgcgtataatgcccgcccggtttgtgttgttttgagagtttccttatggcgttgttaatcactaaaaaatgcatcaattgtgatatgtgtgaacccgaatgcccgaatgaggcgatttcaatgggagatcatatctacgagattaacagcgataagtgtaccgaatgcgtagggcactacgagacaccaacctgccagaaggtgtgcccgatccccaatactattgtgaaagatccggcgcatgtcgagacagaagaacagttgtgggataaatttgtgctgatgcaccacgcggataaaatttaatattctactctggaagtagagtattaattatattactgggaagccttaacgccattatatttatttaattgatgacattagcataatcattcactaagttaatttatatagtatctgcccagacacttatttatagttattaaaggtgcgtccgactggttcaccggacgcaccttaagtacgtttccttgtgttataagaacagaaggatcagctgtaaaacagcaatgatgattttgatgacccgtttaatcaggtatcggcaatcagtcattcgtttttccttaaacaaggaatgcagccattcagattagcccttacatctccccaaaactgaacgtgcgagttattgagggtgcatgctgcactccacaccagagctttgacgacaccactcgtttcaatgggggaattctgtggcatggtgtaaagcacagcaaaatcttcaataacgaagccaattttaatgtacttacgaattggcggtcacgttaatctttccatcaatattgctttcttcgtaaaggctcgagtttttatgctaaagattgcaagttgcttgtaaaagataagtacactgatccataatcgctgttgttgagggtgcatgctgcacaaaattaaagttaaaaagtaaaacccccgttccttaccagttcgggggttttactttttaaagagaacggtattatttttaactttcaataattaccgtggcacaagcatagtgccgctcatctgccagcgttacatgcatatttgcaacgcccagcttttccgccagttttaatgcctcgccccatagccgtagccgtggtttgccgagctcatcattgaatacttcaaattgattaaacgccagaccattgcggatcccggtgccaaacgcttttgctgcggcttctttcacagcaaaacgcttcgccagaaaacgcaccggctggtggtgcgttttccagatagcccattcgttatcgcttaatacgcggcgtgccaggcgatcaccggatcgggcgatcaccgcttcgatgcgagcgatctccacaatatccgtgcctaaacctaatattgccattagccacgcgcttccagcatcagacgcttcatttctgccaccgcatctttcagtccggtcatcactgcacgaccaataatggcatgaccgatattcagttcatgcatctcagggatggcggcaatggctttcacgttgtgataggtcagaccgtgtccggcgttaactttcagaccgaggcttgcggcaaaggtcgcggctttggcgatacgcgccagctcttgcgcctgttcggcgtcagttttggcatcagcatagcaaccggtgtggatctcgataaacggtgcgccaacctctgccgcagctttgatctgctcttcatcggcgtcaataaacagagaaacctgaatcccggcatctgccagacgtttgcaggcatcgcgcattttgtcacgctgccctgcgacatccaggccgccttcggttgttacttcctgacgcttttccggtaccaggcagcaaaaatgtggcttcgtctcaacggcgatcgccagcatctcttcggtcaccgccatctccagattcatgcgggtatccagcgtctgacgcaggatgcgcacgtcgcggtcagtaatgtgacggcgatcttcacgtaaatgcacggtaatgccgtccgctcccgcctgctcggcaataaacgcggcctgcaccggatccgggtaagcggtaccgcgcgcgttgcgcagcgtagcgatatggtcaatgttgacgcctaacagtaattcagccatgacaatcctcatcattcataatgtgttttcaccgttcgcttaggcataaactgccggaacagttccctgctctttaaaggtttaccgccaagatacggcttaagcgccatgcgggtaaagcgtttcgcggcgcgcagtgtgtctgcgtcaggaaattcccgtgcgtttaacgcttttaactgccttccggtgaacgttttattgtcgataacgacgcttgcgataaaccctttttcttcgcgataacgatacgtcatggtgtcatctaccggctcgccgctacccgcacaatgggtaaaattgacgccataacccagatgcccgagcagtgccagttcaaagcggcgcagcgcgggttctggcgtaccagtgacccctgcaagagactgaatgcagtgcaagtaatcgaaaaaaagttcagagaagcgcgtctcgtattccagtacgcgggagagaagttcgttgatgtacagaccgctgtaaagcgtgataccgcttaatggcagcgccagcgagacggcttcagcactgcgcagcgttttgacttcgccacgcccgccaaaacgtagcaagagaggggtgaaaggctgtaatgcacctttcagggtagagcgtttagagcgtgcgcctttggcaaccagacgcacgcgccccgattcctccgtgaagacgtccagcatcaggctggtttcgctccacgggcgactatgcaggacaaatgcgcgctgccagccttccatcggagttactcttaaagatcgtcaacgtaaccgagactgcgcagtgcgcgttcgtcgtcggcccaaccggatttcacttttacccacagttcaaggtgaacaggcgcttcgaacatttcctgcatgtctttacgcgcttcaatcccgatggttttgatcttggcccctttgttgccaatgaccatcttcttctgcccttcacgctcaacgagaatcaaaccgttgatgtcataaccaccgcgttcgttagagacgaaacgttcgatctccacggtcacggagtacggcagttcagcgccgaggaaacgcatcagtttttcgcggatgatttcagacgccataaaacgctgtgagcgatcggtgatgtaatcttccgggaagtgatgagtcgcttcaggtagatgcttacgcacgattgccgcaatagtgtcaacattcagcccggtttcggcagagattggcacgatatcgaggaagttcatctggcttgccaggaactgcaggtgcggcagcagatcggctttctcctgcacgttgtccactttgttcaccgcgaggattaccggcgctttgccttcgcgcagtttgttgagcaccatttcgtcgtccggcgtccagcgggtgccttcaacgacaaaaatcaccagctcaacatcgccaatagagctgctcgccgctttgttcatcaggcggttaatggcgcgtttttcttccatatgcaggcccggtgtatcgacgtagatcgcctgatacgcgccttcagtatggatccccacaatgcggtgacgagttgtctgcgccttgcgggaagtgatggagattttctgccccagcagtttgttcaacaatgtggatttgccaacgttcggacgtccgacgatggcaataaatccgcagtaacttttatcgatgctcattccagctccagttttttcaacgcctgttcggcggcagcctgctcagccttacgacggcttgaacctgtgccaaccaccggttcactcaggccgctgacctggcagtggatagtaaattcctgatcgtgcgcttcgccacgtacctggactaccagataagtcggcagcggcagatggcgaccctgcaaatattcttgcaagcgcgttttcggatctttttgtttatcgcctgggctaatttcgtccaaacgagtttgataccagttgaggattaatttctcgacggtttgaatatcactgtcgaggaatacgccaccaattaatgcttcgacggtgtcggcgagaattgactcacgacgaaatccaccgcttttaagttcacctggccctaaacgtaagcactcgcctaactcaaattcgcgcgccagttccgccagcgtattgccacggaccagcgtggcgcgcatccggctcatatcgccttcatccacacgagggaaacggtgataaagcgcattggcgataacgtagctcagaatagagtcgcctaaaaattctaaacgctcgttatgtttactgctggcactacgatgagttaatgcctgctgcaacagttcctgatgattaaaagtgtagcccagcttccgttgaagccgattaattacgatggggttcatgcgataccaataaataaatgcgtcaacaattcagcacacgaaacagacctgatatacatggttctgctaactgcttcgctgcagtttcagtttaccggtatatggggaccaacgctgtttcgtgtgccgtggcaacctggaggtgccaaccttaaacttcgggggaatattctatacacaacgacgggggatgtcgttagccacgggagatttatctcataaataattcacgttgtcgccataacggcgacaacgtgaacgaagatggctattaatggatgccgccaatgcgacttaagcgcagaccagtcggccattcgccttcttgcttatcgaagctcatccagatagccgttgcccgaccgaccagattcgcttccggcacaaagccccagtaacggctgtccgcgctgttgtcgcggttgtcgcccatcatgaagtattgtcccggaggaacaatccaggttgccagttgttgccctggctgctggtaatacatccccacctgatcctgcgcaatcggcactgtcagaatgcggtgcgtcacatcacccagtgtctctttacgctcggaaagacgaattccattttctttggtttcgtttttcggcacttcaaagaatccgctggtcgcttccccaccattacggcgtgagaaggtctgaacgaaatcgctcggttccacgtttgagtaggtgaccggcagcgcgttttcacacgcctggccggaactgcatcccggttgaatcgtcagctcttttgagaccggatcgtaagtgactttatcgcccggtaaacccaccgcgcgcttgatgtaatcaagctttggatcttccggatatttaaagaccacgatatcgccgcgtttcggatgaccggtttcgatcagcgttttctggtagataggatctttaatgccataagcaaacttctctaccagaataaaatcaccaattaacagagtcggcatcatcgaacctgacgggatctggaacggttcataaataaacgaacgcacaatcaatacgatagccagtaccggaaaaacagaagcaccggtttccagccagccaggcttcggcgcaacctttttcaacgttgctttatccagtgagtccccggcagccgcctgcgccgctgcctgacgttcccgccgtttaggtgcgaaaaagaatttatccacgcaccataaaatgcccgtcaccagtgtggcaatcaccagaatcagggcaaacatattcgccatgccaactcctaagggttatttgttgtctttgccgacgtgcagaatggcgaggaacgcttcctgcggcagctcgacgttaccgatctgcttcatgcgtttcttaccttctttctgcttctgcagcagctttttcttacggctgatatcgccgccataacatttagccagtacgtttttacgcagctgtttcacggtggatcgcgcaatgatgtgcgtaccaatcgctgcctgaatggcgatatcaaactgctggcgtgggatcagatctttcatcttctccaccaactcgcgaccgcggttttgcgaattatcacggtgggtgatcaacgccagcgcatcaacacgttcaccgttgattaatacgtctacacgtaccatgtcggacgcctggaagcgcttgaagttgtaatccagagacgcataaccacgcgaggtagatttcaggcgatcgaagaagtcgagcaccacttccgccatcgggatctcgtacgtcagcgccacctgattaccgtggtaaaccatattggtctgcacgccgcgtttttctacgcacaacgtaataacgttgccgagatatgcctgcggcagcagcatgtgacactctgcaatcggctcgcgcagttcgtagatgttatttaccgcaggcagcttggatgggctgtcgacgtagataacttctcttgacgtggtttcaacttcatacactacggtcggcgcagtggtgatcagatccagatcgtattcacgttccagacgttcctggatgatctccatgtgcagcaggccgaggaagccgcagcggaaaccaaagcccagcgcgctggagctttccggctcatagaacagtgaggcatcgttcaggctgagtttacccagcgcgtcacggaaggcttcatagtcgtcggaacttaccgggaacagaccggcgtatacctgcggtttgactttcttaaagccaggcagcgccttttctgccggattacgcgccagcgttaaggtatcgccgactggagcgccgtggatatctttaatcgcacatacgagccagcctacttcgccacatttcagttcagtgcggtcaacctgtttcggcgtgaagatgcccagacggtcggcgttataggtctgcccggtactcatgactttcactttgtcgcccttacgcagggtgccgtttttaatacggataagtgaaacaacgcccaggtagttgtcgaaccatgagtcgataattagtgcctgcaacgggccttccggatcgccttccggcggcggaatgtcgcgcaccagacgttcgagaacgtcctgcacaccaacgccggttttcgctgaacagcgcaccgcgtcggtggcgtcgatgccgacgatatcttcaatttcttccgccacgcgttcaggatcggctgccggcaggtcaatcttgttcagtaccggcacaacttcgagatccatttccatggcggtgtagcagtttgccagggtttgcgcttctacgccctgcccggcgtcgaccaccagcaatgcaccttcacaggcagccagcgaacgggaaacttcataggagaagtctacgtggcccggggtgtcgataaagttaagctgataggtttcgccgtcagacgctttgtagtccagcgtcacgctttgcgctttgatggtaatgccacgctcacgctcaagatccatggaatcgagaacctgcgcctccatttcacggtcagacaggccaccgcagatctggataatacggtcagacagcgtcgatttaccgtggtcaatgtgagctatgatcgaaaagttacgtatattcttcataaagtatgattattgtgccttaatgcccggttaaccaggcttttagaagtcgctgttctgagcttaacgtctgtattaatagaaacgccgcattctacactacaacattgaggcgaggaaatgttcataccgtatggattgtggtatctggaaacgtcctcgcatttgttatgcaaaatgcaacaaagccagtgaaatcactggctcgcgtcttccgaagatgtttcaaatcgcacaaggccaggcggcaatgccacgcttaagatgatcggttgccattctgcccgggcagcaaacttacgcgagtagccgcgcgcaatcaggaacccgccaataccaccgaggatcgcaccacataatgctgcgacgtcagaagcaaagagtagctgaaatagcgaagcgataaggaataatcccaccagcggcgacatataaaccagtaatgcggagctaagcaggctgccttcggcgatccccaattccactttttgccccggcactaacggctcatcacagggtacgacaatggtatgcgtggtttgcgggccaagtttatttaacacgcggctaccgcaaccggcgcgtgaagcgcagctgctgcatgaagctttaacatcacaactgaccagcgcctgcccgttttgccaggagacgacggtagcccactctttgatcattgcgctgccccgaacttaatattctcggcaatgcgtttcgccgtttgcggcggcagttcaccgacaatggtgatttcggcgttatcacgtacgcttgtactgacggttctgcgtccggtgcgcaacatctgatcggtgctcgatggcgtagcgcggttaacgtttaccgagaagctgaataatccgtcggaatagagacgtgattcgataggcatgttgtccatcgtcggtagcggacgtcgactactggaaacttcgctaaaaccctgtggcaaccaggttggcgtccagctgaatttagctttttcacctacaggaacagaaagcaacggcggcaaatttgccttcgccagcgtctgcatactgctgctgatatcctgattgacgttaaaagcaatcacgcgaaattgttccagcgtttcaccatcgcgatcaaggagatcaacccgcatcggtaatttcgattcggtgtccatccacacgatgtagctgtagcgtgtaccatctcgggcaaccacgcgaatgacttcgcaaagacgatcagcaatacgcgtgcgcccgacggagataaagtcgtagtaaggagaaaggcgtttgaaatcggtatagataagcgatggcagagaatcaacaatgtaatcgccattaagcgtgaacggttcaagtcccggttcaaaatagctgatttcattgccgcgctgtaccacttcccggcgcgggccatccatttgcaacaattgtgcaagaggacggttatcgaggcgtgcatgtcgataacgcagagactcaacaccctgtttattgatgctgatgaatgacagctcgtaattcagtgactgactggccaggttcatctgctgtaataacgccccggacgcgggagtggccgaggcgttagcagagaataacaggctacctgtcactaatgacatggcaaaccaaagttgcttcattactgcgattgcgttcctaaagtttgaattcctggcacctgtacagcggcttgctgggtttgcgcctgctcaaactgaagctgttcagagtggagtcggcgttgcagttcgtaatcctgcaacattgcattaatgcgacgacgctgctcctgtacctgctgctgttgaccattgtttgcggtcgcttcagaaggtactcccaggcttaccgggctggctttacccatcatcggcagtgtattaaataccggcgtttcgggctgctgggacgtttcagattgtccattatagtgctggacgccaacgataactgcaagcgatacgcatgcggctacgcccatttgggtaagctgtgccgcccacggacgtactttctgccagaatggcattttctgccattgatgcggcgcaggctgggcttccgggatcaatgtcgccggttgacgtactggctcttcttcaatggcggccatcacgcgtgaagagatatcgaaatggagcacctcgggagtatcaccccgcattgagtcacggattaagtgatagctttcccaggttttctgcatttctgggttatgagccagttcgttaagcagctcactatccagcgtttcgccatccattaaagcggaaagttgttctttctgcatgcctaatacccttatccagtatcccgctatcgtcaacgcctgataagcggttgaactttgttatcaatagcttccctcgctcggaagatacgtgaacgcaccgtacctaccggacaatccatgatagcggctatctcttcatagctcaggccatccagctcccgcaaggttattgccatgcgtaaatcttccgggagggactcaatagttcggaaaactatctgtctcagttcttctgacaacattaagttctcagggttcgaaatttctttcaacgcgccgccactttcgaagttttcagcttcaatggcatccacatcactggaaggtggacgacgcccctgagcaaccaggtaatttttcgctgtatttacagcaatccgatacagccatgtataaaaagcgctatctccccggaacgaatccagcgcacgataggctttaataaaagcttcttgtaccacatcgggaacatcacccgacggcacatagcgggaaaccagactcgccactttatgctgatagcgcactaccagtaagttaaaggctttctgatctcccttctggacccgttcaaccaggacctggtccgttaactgctcgctcatccgaggtaaagtctccccaaaccaaatttccacgcgctatcgaaacgccactccattagctgcaatttgagcaagcaaagggttagagtgtctcgtttttgtaaagttccgtaacgcatctgtttttgtttgtcatgctgtagacggatcattatctatcattataagtctacagaatctgaacatcgcattatctgtgtagaaatgcccatttaactgcctgaagagtaacccaacggcctttttatttcaccacctaatcctccaccagccagtaacttctctttttctcgccgccctgcgtcagcgtgtttagcaactgtaacaaatattaaaatagcaggtgtttatccgcacaacatgatgctatgctgaccaaaccatgtttagtaaattaaacaaagaaaatgaatactctccctgaacattcatgtgacgtgttgattatcggtagcggcgcagccggactttcactggcgctacgcctggctgaccagcatcaggtcatcgttctaagtaaaggcccggtaacggaaggttcaacattttatgcccagggcggtattgccgccgtgtttgatgaaactgacagcattgactcgcatgtggaagacacattgattgccggggctggtatttgcgatcgccatgcagttgaatttgtcgccagcaatgcacgatcctgtgtgcaatggctaatcgaccagggggtgttgtttgatacccacattcaaccgaatggcgaagaaagttaccatctgacccgtgaaggtggacatagtcaccgtcgtattcttcatgccgccgacgccaccggtagagaagtagaaaccacgctggtgagcaaggcgctgaaccatccgaatattcgcgtgctggagcgcagcaacgcggttgatctgattgtttctgacaaaattggcctgccgggcacgcgacgggttgttggcgcgtgggtatggaaccgtaataaagaaacggtggaaacctgccacgcaaaagcggtggtgctggcaaccggcggtgcgtcgaaggtttatcagtacaccaccaatccggatatttcttctggcgatggcattgctatggcgtggcgcgcaggctgccgggttgccaatctcgaatttaatcagttccaccctaccgcgctatatcacccacaggcacgcaatttcctgttaacagaagcactgcgcggcgaaggcgcttatctcaagcgcccggatggtacgcgttttatgcccgattttgatgagcgcggcgaactggccccgcgcgatattgtcgcccgcgccattgaccatgaaatgaaacgcctcggcgcagattgtatgttccttgatatcagccataagcccgccgattttattcgccagcatttcccgatgatttatgaaaagctgctcgggctggggattgatctcacacaagaaccggtaccgattgtgcctgctgcacattatacctgcggtggtgtaatggttgatgatcatgggcgtacggacgtcgagggcttgtatgccattggcgaggtgagttataccggcttacacggcgctaaccgcatggcctcgaattcattgctggagtgtctggtctatggctggtcggcggcggaagatatcaccagacgtatgccttatgcccacgacatcagtacgttaccgccgtgggatgaaagccgcgttgagaaccctgacgaacgggtagtaattcagcataactggcacgagctacgtctgtttatgtgggattacgttggcattgtgcgcacaacgaagcgcctggaacgcgccctgcggcggataaccatgctccaacaagaaatagacgaatattacgcccatttccgcgtctcaaataatttgctggagctgcgtaatctggtacaggttgccgagttgattgttcgctgtgcaatgatgcgtaaagagagtcgggggttgcatttcacgctggattatccggaactgctcacccattccggtccgtcgatcctttcccccggcaatcattacataaacagataaaaagcctgggtcagcgccgtatacgcttcggaatagttctggtctggcccacgaatgactaagcgatcgctaaagcattctcccgcctgcggggagaatgccagcagcacccgatgcggcagtcgcgcttcgttttccgccacatccgtccgcaaacgtaaatgccagcccatgcttaatgccagctccgtaaaaccattaccaatctgctctggcagcactacgcagaaaaatccctcttcggtaatgcactccgccgcacaggtcagcaacgatgggtgatcaagcgtagtggtatagcgagcctgttcccgttgaggtgtcgagcactctactccctgctgatagtaaggtgggttactgatgattaaatcgaagcgtactgtctgctgtgtgatccactgctgaatatccgccgtatggacgttaatccgctctgcccacggggactggttgatattttcctgcgcctgcgcggcagcttcactttccagttcaactgcatcaatcatcacgctgtcatcggttcgctgcgccagcattaatgccagcaacccgctacccgcgccgatatcaaggcaacgttttaccccagccaccggtgcccatgcgcccaataaaataccatccgttcccactttcatcgcacagcgatcgtgagcaacaaaaaactgtttaaaagtaaatccattacgacgaagcacggatgtagactgtgacatgaaaataaaaccttgcaggaaaaacggcgatagcaccgggtgagaacaatacccgagaagcgatatccatacaaacagatgaagattgcagccgtaacgtctataatcagcgccccacacagaggtagaacatgactgtaacgactttttccgaacttgaactcgacgaaagcctgctggaagccctccaggataaaggtttcactcgcccgaccgccattcaggctgccgccattccgcctgcgctcgatggccgtgatgtactcggttctgcgccgacaggcaccggtaaaacggcggcgtatctgctgccagcgttgcagcacctgctcgatttcccgcgtaagaaatccggtccgccgcgtattttgatcctcaccccaactcgcgagctggcgatgcaggtggccgatcatgcccgcgaactggcgaaacatacgcatctggatatcgccaccatcaccggcggcgtagcctatatgaaccacgcggaagtgttcagcgaaaatcaggacatcgtggtcgccacgaccggacgtctgctgcaatacataaaagaagagaacttcgattgccgcgcggttgaaacgctgatcctcgacgaagcagaccgtatgctggatatgggcttcgctcaggatatcgaacatattgctggcgaaacgcgctggcgtaaacagaccctgctcttttcggcaacgctggaaggcgatgcgattcaggactttgccgagcgtctgctggaagatccggtggaagtttctgccaatccctccacccgtgagcgcaaaaaaattcatcagtggtattaccgcgccgatgatcttgagcataaaaccgcgttgctggtgcatctgttaaaacagccggaagcgacccgctcaattgtgtttgtgcgtaagcgtgagcgtgtgcatgagctggcaaactggctgcgcgaagcgggcatcaacaactgctatctcgaaggtgagatggtacagggcaagcgtaacgaagcgatcaagcgtttgaccgaaggtcgcgtaaacgtactggtcgcaaccgatgttgccgcgcgcggtatcgacattcctgacgtcagccacgtctttaacttcgatatgccgcgcagtggcgatacttatttgcaccgtatcggacgtaccgcgcgcgccggtcgtaaaggcaccgcaatttcgctggtggaagcccatgaccatctgctgctgggtaaagtaggccgctatattgaagagccaattaaagctcgcgttattgatgagttacgcccgaaaacgcgtgcgccaagcgaaaagcagaccggcaagccatcgaagaaagtactggctaaacgtgctgagaagaaaaaagctaaagagaaagagaagccgcgggtgaaaaaacgccatcgcgacaccaaaaatattggtaagcgccgtaaaccaagcggaacgggcgtgccaccgcaaacgacagaagagtaatctcaatgccaggtttaagcctggtattaaaagtgctggcaaacgcaaaactgcctgatgcgctacgcttatcaggcctacgtggctcatgcaatatattgaatttgcacgatcttgtaggccggataaggcgttcacgccgcatccggcatgaataaagcgcactttgtcgacaagttaaatgccgggtttaatcccgacattatttttatccagccacaaaactctcttcaacacactgaataaaagtgtgcatcgccgggctaaccgcttttccagcatgatgtgcgcacatggccgtaatggtctgcgactgttcgccaaaaggcaattcaattaattctccgcactccaactcttttgccaccgcaaagcgcggtaggtagctgaccccgatattcgccgcgacacaacgcttgatgctttcgatacttataagctcaatggtgttttccaccgtgatccgccgctgacgcagcgtgctctcaaatatctgccggaagacacattgcggttcgttgataataaagctacaggcgttatgtcttcccggctcagtaaaatcgacatctgcaatttgcggtgaagccaccagcaccagtgattgttcacccaactctcgtcgattcagagcatcatcattccctacacgataaaagacgccaacatcggcctcatcattcagtagcgcatcacggatcacgtaacagttcagcgactgcaacgataaacgcacttttggggcgcgttgccgaaaacgctgtaacacctgcggcattcggtaagagagcaacgtttcgcccgaaacaacgcgtagttccccgtccggatctgactcctttttggcagcctcacgaagcgtatccatcactcgggtaagttcataaatgtgcggcagcaacttttttccttcgcgggtaaggcacatccgtcggccaattttctcaaataactggactgaaaactcctgctcaagctgctgaatatgaaaagtcaccgtcgattgtgtacagcacaatttttgcgaagctcgcaaaaaggaaccctcttccaccacggttttaagcgtaataaaacggcgcagatccataaccccaaacctatcgaaaatatcgaatctagaatataaaaacattcattttcttaaatgttccgtgtcgggtactgtctaccaaaacagaggagataacaagtgacaccgacccttttaagtgctttttggacttacaccctgattaccgctatgacgccaggaccgaacaatattctcgcccttagctctgctacgtcgcatggatttcgtcaaagtacccgcgtgctggcagggatgagtctgggatttttgattgtgatgttactgtgtgcgggcatttcattttcactggcagtgattgacccggcagcggtacaccttttgagttgggcgggggcggcatatattgtctggctggcgtggaaaatcgccaccagcccaacaaaggaagacggacttcaggcaaaaccaatcagcttttgggccagctttgctttgcagtttgtgaacgtcaaaatcattttgtacggtgttacggcactgtcgacgtttgttctgccgcaaacacaggcgttaagctgggtagttggcgtcagcgttttgctggcgatgattgggacgtttggcaatgtgtgctgggcgctggcggggcatctgtttcagcgattgtttcgccagtatggtcgccagttaaatatcgtgcttgccctgttgctggtctattgcgcggtacgcattttctattaacgaaaaaaagcggaagaggtcgccctcttccgcttagtaacttgctacttaagccttacaggctttcagtaaaggtacgagcgataacgtcgcgctgctgttccggagtcagagagttaaagcgaactgcataaccggatacacggatggtcagctgcggatatttttccggatgcttaactgcatcttccagagtttcgcgacgcagaacgttaacgttcaggtgttgaccaccttcaacgcgaacttctggtttcacttctactggaacttcacggtattcaatgtcacccagtttgcttactgcaaccacttcatcttctgcataacctgcttttgcaacgatgcaacgcgcttcgcctttttcgctgtccagcagccagaaagagttcagcagatcgtcgttagcggctttagtaatctggatacctgtaatcatgtgatgcctccccggcaaaattatttgatttgttcagcctgtcgcggccaattggtaaaaccattgttgcttgagtgtatatatactcctcaaacacccttgaatctttgatttaaatcaataaaaaccacacatcaagtatggtcgcaaatggattttattgttttacatcaacttatgcgggtgtgaaattttaccaatttacatttttttgcactcgtttaagtctaaaaaatgagcatgattttgttctgtagaaagaagcagttaagctaggcggattgaagattcgcaggagagcgagatggctaacgaattaacctggcatgacgtgctggctgaagagaagcagcaaccctattttcttaatacccttcagaccgtcgccagcgagcggcagtccggcgtcactatctacccaccacaaaaagatgtctttaacgcgttccgctttacagagttgggtgacgttaaagtggtgattctcggccaggatccttatcacggaccgggacaggcgcatggtctggcattttccgttcgtcccggcattgccattcctccgtcattattgaatatgtataaagagctggaaaatactattccgggcttcacccgccctaatcatggttatcttgaaagctgggcgcgtcagggcgttctgctactcaatactgtgttgacggtacgcgcaggtcaggcgcattcccacgccagcctcggctgggaaaccttcaccgataaagtgatcagcctgattaaccagcatcgcgaaggcgtggtgtttttgttgtggggatcgcatgcgcaaaagaaaggggcgattatagataagcaacgccatcatgtactgaaagcaccgcatccgtcgccgctttcggcgcatcgtggattctttggctgcaaccattttgtgctggcaaatcagtggctggaacaacgtggcgagacgccgattgactggatgccagtattaccggcagagagtgagtaaatttgcggggaaatgccggatggcagagttgccacccggctgatttatcaggctttattctgacgccaccattcaccaagcaaaacgccggttgcgacagagatattcagcccggcaacgttgcccgtaccgtcaatcttcacgcgcagatcgttcggatcgcgtgcggcatccggtaacccttcatattcctgacccagcaccagtaccattttcgctggcagactagttttgaacagcggtttaccctgctcgctggaagtggtcactacggtgtaacctgcctgacggaaatcatccagcacgttaacaatgttgtcgccagtaatcggctgaacgtgctctgcgccgccttctgcggtacggatagccgcccccgactccagcagtgccgcatcctgcaccacgacacctttcacgccgaagtgcgcgcagctgcgcatcatgccacccaggttatgcgggttagattcgttttccagtgccagaacgcaatcctgcgcgcctgcctggcttacccactgctgcacggttgtaccgttacgctttttgatcaagaagcaaacgccgccgtgatgttccgtgcctgacgcttttgtcaattccgcttcatccaccacatggtacgctttgcggtttgctgccatccagcgcaaagcttctttaaaacgcggcgttacactctggataaaccaggcgcgaacaatcgcttccggacggctctggaaaagtgcctgacatgcattttcgccgtagacgcgggtttcttccgcacgcagacgacgcaacacttccggatcaataaaacttttaccactgatgccaccgtgatcggccttttccggcgtctcatcacccggcgcgcgggaaaccgtgcgccacggcgaatcttcccacttgcggtcacggggctgactctgtttgtcatcgcgggcggggcgacggccaccgtcagcacgagattttcctggacgcccgccccctttcccggtacgcgggttgtgggtacgtttatcagaatcatcatcactgcggacatacatcactttgaccttgccgcttttacctttcatttcatcgttcatgcttttctccaccagcgctgcgcgaagcgcgcagattacccgaagtccgcgcggttcgccatgatttcgtaccaaagcctgcgactatcatacctattgaataaaacagattgttgtctggaacaatgtccccgataatatgtaacatattagaaacataccggcgtcgttgccgataagtctccttactcatcccgaggttagttatgaataccgtttgtacccattgtcaggccatcaatcgcattcccgacgatcggatcgaagatgcggcaaaatgcggacgctgcggtcacgacttgtttgacggagaggtgattaatgcgaccggtgaaacactcgacaaattgctgaaggatgatctagctgtggtgatcgacttctgggcaccgtggtgcggcccctgccgtaatttcgcaccaatttttgaagatgtcgcgcaagagcgtagcggtaaagtgcgctttgtgaaagtgaataccgaagctgaacgtgaattgagcagtcgctttggaattcgtagtataccgacgatcatgattttcaaaaacggtcaggttgtcgacatgcttaatggcgcagtaccgaaagcgccgttcgatagctggctgaacgaatctctttaatcttaccggggcgcatcttgtgccccgttttctcctctgcgacaatggcgttttttcgacgctctcttatgaccgaaaacgctgttctccagttacgcgccgagcgtattgcgcgcgcaacacgtccttttcttgcccgcggtaatcgcgttcgtcgctgccaacgctgtcttttgccagagaaattatgtctctgttcgacaattaccccagcacaagcaaaaagtcgcttctgtttgctgatgttcgacaccgagccaatgaagcccagtaataccgggcgtctcattgctgatattttgcctgataccgttgcgtttcaatggtcgcgtaccgaaccctcgcaggatttgctggagttggtgcaaaacccggactatcagccaatggtggtctttcccgcttcgtatgctgatgagcaacgggaagtgatcttcacaccacctgccggtaagccaccgctgtttatcatgctcgatggtacctggccggaagctcgcaagatgtttcgtaaaagtccgtatctggataatcttcccgtcatttccgtcgatctttcccggctttctgcctatcgcctgcgtgaagcccaggctgaaggccaatattgtactgccgaggtagccatcgcactgttagatatggccggcgataccggggcggcggcagggttaggcgagcattttacccgctttaaaacacgctatctggcaggaaaaacgcaacatctgggtagcatcacagcagaacagttagaaagcgtttaaaatcattcggtcacttctgcgggagaccggtatgagtcagcgaggactggaagcactactgcgaccaaaatcgatagcggtaattggcgcgtcgatgaaacccaatcgcgcaggttacctgatgatgcgtaacctgctggcgggaggctttaacggaccggtactcccggtgacgccagcctggaaagcggtgttgggtgtgttggcctggccggatattgccagcttgccctttacacccgaccttgcggttttatgtaccaatgccagccgtaatcttgctcttctggaagagctcggcgagaaaggctgtaaaacctgcattattctttccgccccggcatcgcaacacgaagatctccgcgcctgcgccctgcgccataacatgcgcctgcttggaccaaacagtctgggtttactggctccctggcaaggtctgaatgccagcttttcgcctgtgccgattaaacgcggcaagctggcgtttatttcgcaatcggctgccgtctccaacaccatcctcgactgggcgcaacagcgtaagatgggcttttcctactttattgcgctcggcgacagcctggatatcgacgttgatgaattgcttgactatctggcacgcgacagtaaaaccagcgccatcctgctctatctcgaacagttaagcgacgcgcgacgctttgtttcggcggcccgtagtgcctcgcgtaataaaccgattctggtgattaaaagcggacgtagcccggcggcacagcgactgctcaacacgacggcaggaatggacccggcatgggatgcggctattcagcgtgccggtttgttgcgggtacaggacacccacgagctgttttcggcggtggaaacccttagccatatgcgcccgctacgtggcgaccggctgatgattatcagcaacggtgctgcgcctgccgcgctggcgctggatgccttatggtcacgcaatggcaagctggcaacgctaagcgaagaaacctgccagaaactgcgcgatgcactgccagaacatgtggcaatatctaacccgctcgatctacgcgatgacgccagcagtgagcactatattaaaacgctggatattctgctccacagccaggattttgacgcgctgatggttattcattcgcccagcgccgctgctcccgcaacagaaagcgcgcaagtattaattgaagcggtaaagcatcatccccgcagcaaatatgtctctttgctgacgaactggtgcggcgagcactcctcgcaagaggcacgacgtttattcagcgaagccgggctgccgacctaccgtaccccggaaggaaccatcactgcttttatgcatatggtggagtaccggcgtaatcagaagcaactacgcgaaacgccggcgttgcccagcaatctgacttccaataccgcagaagcgcatcttctgttgcaacaggcgattgccgaaggggctacgtcgctcgatacccatgaagttcagcccatcctgcaagcgtatggcatgaacacgctccctacctggattgccagcgatagcaccgaagcggtgcatattgccgaacagattggttatccggtggcgctgaaattgcgttcgccggatattccacataaatcggaagttcagggcgtcatgctttacctgcgtacagccaatgaagtccagcaagcggcgaacgctattttcgatcgcgtaaaaatggcctggccacaggcgcgggtccacggcctgttggtgcaaagtatggctaaccgtgctggcgctcaggagttgcgggttgtggttgagcacgatccggttttcgggccgttgatcatgctgggtgaaggcggtgtggagtggcgtcctgaagatcaagccgtcgtcgcactgccgccgctgaacatgaacctggcccgctatctggttattcaggggatcaaaagtaaaaagattcgtgcgcgcagtgcgctacgcccattggatgttgcaggcttgagccagcttctggtgcaggtttccaacttgattgtcgattgcccggaaattcagcgtctggatattcatcctttgctggcttctggcagtgaatttaccgcgctggatgtcacgctggatatctcgccgtttgaaggcgataacgagagtcggctggcagtgcgcccttatccgcatcagctggaagaatgggtagaattgaaaaacggtgaacgctgcttgttccgcccgattttgccagaagatgagccacaacttcagcaattcatttcgcgagtcaccaaagaagatctttattaccgctactttagcgagatcaacgaatttacccatgaagatttagccaacatgacacagatcgactacgatcgggaaatggcgtttgtagcggtacgacgtattgatcaaacggaagagatcctcggcgtcacgcgtgcgatttccgatcctgataacatcgatgccgaatttgctgtactggttcgctcggatctcaaagggttaggcttaggtcgacgcttaatggaaaagttgattacctatacgcgagatcacggactacaacgtctgaatggtattacgatgccaaacaatcgtggcatggtggcgctagcccgcaagctcgggtttaacgttgatatccagctcgaagaggggatcgttgggcttacgctaaatcttgcccagcgcgaggaatcatgagtaaggtactggaaatgttgaccacttaatcgggactggtgttattattgcccgcttatgtcgtctgcattgcacagaggacccttcaatgaacagagaagaaatgcactgtgatgttgtcaaaatttaagcgtaataaacatcaacaacaccttgcccaactacccaagatttctcaatcagttgatgatgtcgatttcttttacgctcccgccgacttccgggagacgctgctggaaaaaatagccagcgcgaagcagcgcatttgcattgtcgccctgtatctcgaacaggatgacggtggcaaaggcattctgaacgcgttgtatgaggctaaaaggcagcgtccggaactggatgtgcgggtgctggtcgactggcatcgtgcacaacgtggacgcattggcgctgcggcatctaacactaacgctgactggtactgccgcatggcgcaggaaaatccgggcgtagatgttccggtttatggcgttccaatcaatactcgtgaagcccttggtgttctgcactttaaaggctttatcatcgacgatagcgtactttatagcggtgccagcctgaacgatgtttacctgcatcagcacgataaatatcgctacgaccgttatcatctgatccgtaaccgtaagatgtcagacattatgtttgaatgggttacacagaatattatgaatggccgcggcgttaatcgtctggatgatgttaatcggccaaaaagcccggaaatcaagaacgatattcgtctgttccgccaggagctgcgtgatgccgcttatcatttccagggcgatgccgacaacgatcagctttctgtaacgccgctagtggggctggggaaatcgagtctgttgaacaagaccattttccatcttatgccttgtgccgagcagaaactaaccatctgtacgccatacttcaacctgccagcaatccttgtgcgcaatattatccagttgctgcgcgaagggaaaaaggtcgaaattattgttggtgataaaaccgcgaatgacttctacattccggaagatgaacctttcaagataattggcgcattgccttatctctatgagatcaatctgcgtcgtttcctgagccgtttgcagtattacgtcaatactgaccagctagtggttcggttatggaaagatgacgacaacacctatcacctgaaagggatgtgggttgatgataagtggatgttgatcaccggtaataacctgaacccgcgcgcctggcgtctggatctggaaaacgccattttgatccacgatccgcaacttgagctggcgccacagcgagagaaagaactggagctgatccgcgagcataccaccatcgttaagcactatcgcgatctgcaaagtattgccgattatccggtgaaggttcgtaaactcatccgccgtttgcgccgtatccgcatcgaccgattaattagccgcatcctgtaatcacaaccccgtcctgtacggggtttgttttttggaggccacgttttgcgtattctttttgtctgttcgctattgttactttctggatgcagccatatggctaacgatagctggagcgggcaggataaagctcaacactttatcgcctcggcgatgctttccgccgccggaaatgaatattcacagcatcaggggatgagccgggatcgcagtgccatgtttggattgatgttctctgtcagtttgggggcgtcaaaagagctttgggatagccgccccgaagggagcggctggagctggaaggatttggcctgggatgtcgccggtgcaagcaccggctataccgtctggcaactgacccgtcactaaagacgcatccccttccctttgcgatgtagcatcaaagaaaccagaaacgccaccacggccatcaaggtcacataccagaagaaggctgtttccattcctattgatttcagcgacaacgctacgtactccgccgaaccaccaaatatagcattagcgaccgcatatgacagaccaacgcctaatgcgcgaacctgtgccgggaacatctcagccttcagtattccactgattgatgtataaaaactcactatcagcagggcacacatcaccagaccaaaagcggcataaggcgaggaaacgttttgcaatgctgagagaataggaacggtaaaaatggctgccagcgaaccgaaacataacattgaggtacggcgaccaatcttatccgacagcgcgccaatgagtggttgaataagcatgaatacaaacaatgcggcagtcataatgccactcgccacgttggcatgcattcccgcagtatttaccagatacttctgcatataagtagtgaaggtatagaaacaaagggagcccgcagcggtaaaaccgagaaccatgatgaatgcacggcgattgcgccataatcctttcagagatccagcttcttttaaagcgcgcgtttcttgttgcgaagtttcatctaactgacgacgtaaccacaacgccacaacagctaacacagctcctaacgcgaaaggaatacgccatccccactctctgagtgcagcgtcttccatggtgtgttgtaaaaccacgacaaccagtagggctagcagttgtccgccgatcaacgtcacatactgaaatgatgcgtaaaaacctttgcgcccttcaacggcaacttcactcatataggtggcgctggtgccatattctccgccaacagataatccctgaaataaacgagcgagaagcaataatgccggagcccacgtacctatagtttcataacctgggaggcaggcgataaccagcgatccgaaacacatcatacacaccgataacagcatcgattttttgcgaccatgtttatcggctatgcggccaaatagccaaccgcctattgggcgcatcaggaatcccgcagcaaaaacacctgctgtttgtagtagttgagtcgtcgtgttcccggaagggaagaagatgtgggcaaagtagagtgaacagaacgagtagacatagaaatcgaaccactcgaccagattacctgaagaggcccccacaatcgcccaaatgcggcgacgagtatcactacttgtcagtttgctgtctgccgttacagtactttcagccatgccattatgtctcctgccgtaatccgatgcttttgtcggtcgcttttgtttattttttttggtaaaggaaatgttatacatttgttgcatatcattatgcaaccttaaccatgaatttagttagcaggaaaatggttattgaggagcttaaggataaatttctggtaaggaggacacgtatggaagtgggcaagttggggaagccgtatccgttgctgaatctggcatatgtgggagtataagacgcgcagcgtcgcatcaggcatttttttctgcgccaatgcaaaaaggccatccgtcaggatggcctttcgcataatttgatgcctggcagttccctactctcgcatggggagaccccacactaccatcggcgctacggcgtttcacttctgagttcggcatggggtcaggtgggaccaccgcgctacggccgccaggcaaattctgttttatcagaccgcttctgcgttctgatttaatctgtatcaggctgaaaatcttctctcatccgccaaaacagcttcggcgttgtaaggttaagcctcacggttcattagtaccggttagctcaacgcatcgctgcgcttacacacccggcctatcaacgtcgtcgtcttcaacgttccttcaggacccttaaagggtcagggagaactcatctcggggcaagtttcgtgcttagatgctttcagcacttatctcttccgcatttagctaccgggcagtgccattggcatgacaacccgaacaccagtgatgcgtccactccggtcctctcgtactaggagcagcccccctcagttctccagcgcccacggcagatagggaccgaactgtctcacgacgttctaaacccagctcgcgtaccactttaaatggcgaacagccatacccttgggacctacttcagccccaggatgtgatgagccgacatcgaggtgccaaacaccgccgtcgatatgaactcttgggcggtatcagcctgttatccccggagtaccttttatccgttgagcgatggcccttccattcagaaccaccggatcactatgacctgctttcgcacctgctcgcgccgtcacgctcgcagtcaagctggcttatgccattgcactaacctcctgatgtccgaccaggattagccaaccttcgtgctcctccgttactctttaggaggagaccgccccagtcaaactacccaccagacactgtccgcaacccggattacgggtcaacgttagaacatcaaacattaaagggtggtatttcaaggtcggctccatgcagactggcgtccacacttcaaagcctcccacctatcctacacatcaaggctcaatgttcagtgtcaagctatagtaaaggttcacggggtctttccgtcttgccgcgggtacactgcatcttcacagcgagttcaatttcactgagtctcgggtggagacagcctggccatcattacgccattcgtgcaggtcggaacttacccgacaaggaatttcgctaccttaggaccgttatagttacggccgccgtttaccggggcttcgatcaagagcttcgcttgcgctaaccccatcaattaaccttccggcaccgggcaggcgtcacaccgtatacgtccactttcgtgtttgcacagtgctgtgtttttaataaacagttgcagccagctggtatcttcgactgatttcagctccatccgcgagggacctcacctacatatcagcgtgccttctcccgaagttacggcaccattttgcctagttccttcacccgagttctctcaagcgccttggtattctctacctgaccacctgtgtcggtttggggtacgatttgatgttacctgatgcttagaggcttttcctggaagcagggcatttgttgcttcagcaccgtagtgcctcgtcatcacgcctcagccttgattttccggatttgcctggaaaaccagcctacacgcttaaaccgggacaaccgtcgcccggccaacatagccttctccgtccccccttcgcagtaacaccaagtacaggaatattaacctgtttcccatcgactacgcctttcggcctcgccttaggggtcgactcaccctgccccgattaacgttggacaggaacccttggtcttccggcgagcgggcttttcacccgctttatcgttacttatgtcagcattcgcacttctgatacctccagcatgcctcacagcacaccttcgcaggcttacagaacgctcccctacccaacaacgcataagcgtcgctgccgcagcttcggtgcatggtttagccccgttacatcttccgcgcaggccgactcgaccagtgagctattacgctttctttaaatgatggctgcttctaagccaacatcctggctgtctgggccttcccacatcgtttcccacttaaccatgactttgggaccttagctggcggtctgggttgtttccctcttcacgacggacgttagcacccgccgtgtgtctcccgtgataacattctccggtattcgcagtttgcatcgggttggtaagtcgggatgacccccttgccgaaacagtgctctacccccggagatgaattcacgaggcgctacctaaatagctttcggggagaaccagctatctcccggtttgattggcctttcacccccagccacaagtcatccgctaatttttcaacattagtcggttcggtcctccagttagtgttacccaaccttcaacctgcccatggctagatcaccgggtttcgggtctataccctgcaacttaacgcccagttaagactcggtttcccttcggctcccctattcggttaaccttgctacagaatataagtcgctgacccattatacaaaaggtacgcagtcacacgcctaagcgtgctcccactgcttgtacgtacacggtttcaggttctttttcactcccctcgccggggttcttttcgcctttccctcacggtactggttcactatcggtcagtcaggagtatttagccttggaggatggtccccccatattcagacaggataccacgtgtcccgccctactcatcgagctcacagcatgtgcatttttgtgtacggggctgtcaccctgtatcgcgcgcctttccagacgcttccactaacacacacactgattcaggctctgggctgctccccgttcgctcgccgctactgggggaatctcggttgatttcttttcctcggggtacttagatgtttcagttcccccggttcgcctcattaacctatggattcagttaatgatagtgtgtcgaaacacactgggtttccccattcggaaatcgccggttataacggttcatatcaccttaccgacgcttatcgcagattagcacgtccttcatcgcctctgactgccagggcatccaccgtgtacgcttagtcgcttaacctcacaacccgaagatgtttcacttcagagttgcgaaaatttgagagactcacgaacaactttcattgttcagtgtttcaattttcagcttgatccagatttttaaagagcaaatatatcaaacaagacttaacagtctgttttgagatattgaggtcggcgactttcactcacaaaccagcaagtggcgtcccctaggggattcgaacccctgttaccgccgtgaaagggcggtgtcctgggcctctagacgaaggggacacgaaaattgcttatcacgcgttgcgtgatattttcgtgtagggtgagctttcattaatagaaagcgaacggccttattctcttcagcctcactcccaacgcgtaaacgccttgctattcacttttcatcagacaatctgtgtgagcactgcaaagtacgcttctttaaggtaaggaggtgatccaaccgcaggttcccctacggttaccttgttacgacttcaccccagtcatgaatcacaaagtggtaagcgccctcccgaaggttaagctacctacttcttttgcaacccactcccatggtgtgacgggcggtgtgtacaaggcccgggaacgtattcaccgtggcattctgatccacgattactagcgattccgacttcatggagtcgagttgcagactccaatccggactacgacgcactttatgaggtccgcttgctctcgcgaggtcgcttctctttgtatgcgccattgtagcacgtgtgtagccctggtcgtaagggccatgatgacttgacgtcatccccaccttcctccagtttatcactggcagtctcctttgagttcccggccggaccgctggcaacaaaggataagggttgcgctcgttgcgggacttaacccaacatttcacaacacgagctgacgacagccatgcagcacctgtctcacggttcccgaaggcacattctcatctctgaaaacttccgtggatgtcaagaccaggtaaggttcttcgcgttgcatcgaattaaaccacatgctccaccgcttgtgcgggcccccgtcaattcatttgagttttaaccttgcggccgtactccccaggcggtcgacttaacgcgttagctccggaagccacgcctcaagggcacaacctccaagtcgacatcgtttacggcgtggactaccagggtatctaatcctgtttgctccccacgctttcgcacctgagcgtcagtcttcgtccagggggccgccttcgccaccggtattcctccagatctctacgcatttcaccgctacacctggaattctacccccctctacgagactcaagcttgccagtatcagatgcagttcccaggttgagcccggggatttcacatctgacttaacaaaccgcctgcgtgcgctttacgcccagtaattccgattaacgcttgcacctccgtattaccgcggctgctggcacggagttagccggtgcttcttctgcgggtaacgtcaatgagcaaaggtattaactttactcccttcctccccgctgaaagtactttacaacccgaaggccttcttcatacacgcggcatggctgcatcaggcttgcgcccattgtacaatattccccactgctgcctcccgtaggagtctggaccgtgtctcagttccagtgtggctggtcatcctctcagaccagctagggatcgtcgccttggtgagccgttaccccaccaacaagctaatcccatctgggcacatccgatgacaagaggcccgaaggtccccctctttggtcttgcgacattatgcggtattagctaccgtttccagtagttatccccctccatcaggcagtttcccagacattactcacccgtccgccactcgtcagcgaagcagcaagctgcttcctgttaccgttcgacttgcatgtgttaggcctgccgccagcgttcaatctgagccatgatcaaactcttcaatttaaaagtttgatgctcaaagaattaaacttcgtaatgaattacgtgttcactcttgagacttggtattcatttttcgtcttgcgacgttaagaatccgtatcttcgagtgcccacacagattgtctgataaattgttaaagagcagtgccgcttcgctttttctcagcggcgcggggtgtgcataatacgccttcccgctacagagtcaagcatttctttgcttttctctgttgagattctcaggagaaccccgctgacccggcggcgtgtttgccgttgttccgtgtcagtggtggcgcattatagggagttattccggcctgacaagcgaaaaatataaaaactttatcgttcgctcacttttcaggcaaaacatcttaaatatagtcttttccgtctaacttatagacaaaaacgagccccgaagggctcgttttatcatttactggacggcgacaatccggtcttcattaacttccaggcgaatcactttacccggaaccaattcaccagacagtatttgctgtgccagcgggttttcgatctgctgctgaattgcacgtttcagaggacgtgcaccatagaccggatcgtaaccgttctcgctcagcagtttcagcgcctcgtcagaaatgtggatttcataaccacgttcttccagacgtttgtacagacgtttcaactgaatctgcgcaatcgaggcaatgtgctgttcacccagcggatggaagaccaccacttcatcgatacggttaatgaattccggacggaagttatggcttaccacaccgagcaccagctctttcatgtgcgcataatccagttcaccgaagcgttcctgaatcagatcggaaccgaggttagaggtcataatgacgaccgtattacggaagtcgaccgttctcccttgcccgtcagtcagacgcccatcatccagtacctgcaacagaatgttgaagacatccggatgcgctttttccacttcatccagcaggatgacggaatacggacgacgacgcaccgcttcggtcaggtagccaccttcttcataaccgacatatcccggaggcgcaccaaccaaacgagacaccgagtgtttctccataaactcggacatatcgatacggaccatcgcctcgtcgctatcaaacataaagttcgccagcgccttacaaagctctgttttccccacaccagttgggccgaggaacaggaatgaaccaatcgggcgatttggatccgccagccccgcacggctacgacgaatagcgttagataccgcatcaaccgcttcgttctgaccaattacgcgatggtgcagttcttgctccatacgcagcagtttttcgcgctcgctttccatcatgcgagaaaccggaatccccgtccaacgcgccagcacttcagcaatttcggcgtcggtcactttattacgcaacagacgcatagttttgccttcgagctgcgttgcggcttccagttgcttttccagttccgggattttgccgtattgcagttcagacatccgcgccaggtcccccacacggcgagcctgttcaatagcgattttcgcctgttccagttccgctttaatggtctgcgtaccagaaagcgatgccttctctgctttccactcttcttctaactcggagtactgacgttctttgtcgctcagttcttcgttgagcatatccagacgttttttactggcttcatcagactctttcattaacgcctgttgttccagtttgagctggatgatacgacgatcgagtcggtcgagttcttctggttttgagtcaatctgcatacgaatgctggatgctgcttcatcgatcaggtcgatggctttatccggcagctgacggtcagcaatgtagcgatgagacaacgtcgccgctgcaacaattgccgggtcagtaatttgcacatggtggtgcaattcgtaacgttctttcaggccacgcagaatcgcaatggtatcttcaacagaaggctcggcaacaaacactttctggaaacgacgttccagcgcagcatctttttcaatgtactggcgatattcgtcaagcgtcgtggcacctacgcagtgcaattcaccacgcgccagcgccggtttcagcatgtttccggcgtccattgcgccatcggctttacccgcgccgaccatggtatgtaattcgtcgataaataggatgacgttgccttcctgtttggcaagatcgttaagcacgccttttaaacgttcttcaaactcaccgcgatatttcgccccagccaccagcgcgcccatatccagcgccagtacccggcggcctttcaacccttccggcacttcgccgttgataatacgctgcgccagaccttcaacgatggcagttttaccgacgccgggttcaccaatcagtaccgggttatttttagtacgacgttgcagcacctgaatggtacggcgaatttcttcatcacgaccaatcaccggatcgagtttgccctgttcggctcgttcggtaaggtcgatggtatattttttcaaagcctgacgttggtcttcagcaccttgatcgttcacgctttcacctccacgcatttgttcaatcgcttgagtaatgttggcggtggtcgcccctgctgctttcaggatgtcggccagcgtgccgcgagactcaagtgccgccagaacgaacagttctgacgagataaagttatcaccacgtttttgcgccagcttgtcgcaaagattaagaacgcgcaccagatcctgtgatggctggacatcaccaccagtaccttcaacctgcggtaaacgatttaatgcctgattgatatctgtgcgcaactggccagcatttatgccagcggatgttaataaaggactaaccgaacccccttcctgattcagcagggcgctcattaaatgaagtggttcgataaattggttgtcgtgcccgagtgcaagtgattgggcatcggcaagagcaagctggaatttattagtaagacgatccagacgcataactcctcccataacggatcaaagttgctactggagattaaatgaggtcatccctcaattattcaaggttattgaccagattaatgtgaaaagaaaatcacgcgtaccggatcgtcttgattctttaggttatatcagccaaatgaaacttgccatacgaccggtggtcttgtcgcgacgataagagaagaaagtctcattttccgtatatgtacaacggtcgccgccgaaaatttgctcaacacccacgttcgccagacgctgccgggcaagctgataaatatccgccagatacttatcaccatgctgaatgaaagctgcacttgctttagcgtctactgccataaacgcctcgcgaacctccccccccacttcgaacgcgcgtggaccaattgccggccctaaccaggcgagaatattttccggattatcagcaaaacaggaaaccgtctcttccagcacgcctgcgcacagtccacgccagccagcatgagcggcggcgacttccgttcccgctcgattgcaaaacagcacagggaggcagtcggcagtcatcactgcgcaaaccgtgccgggcgtattgctataagaggcatccgcccgttttgaggcataaggttcgccagtgagcttaagcacatctttgccgtgtacctgctcaagccagaccggtttagaaggcaaattgcccgcagcaaaaagtcgcttgcgattctcctcaacgtgatccgggttatcgccacaatgggcaccgaggttgagtgagtcatacgggggcaagctcacgccgccgatacgagtggagctacaggccgcaacaccttttggctgcggccactgcgggacaatcagcttactcataaccagtccacttcatccttatgttcttcgaaatcggcgcgcatcacctcaatcagctccaccatatcttgtggaataggcgcatgccattccatttcgatgccggagatcgggtgataaagacgcagcatggttgcatgtagcgcctggcggtcaaacttacgcagcgtggagataaatgcttccgaagcaccttttggcggacgcggacggccaccataaaccggatcgcccaccagcggatgagtgatatgggccatatgcacgcggatctggtgcgtacgtccagtttccagacgcaaccgcagacgcgtgtgcacacggaagtgttccatgatgcgatagtgagtcaccgctggtttgcccatcggatgcaccgccatatgggtacgtttggtcgggtggcgactgattggctcgtccaccgtgccacctgcggtcatatgaccaatcgccaccgcttcatactcacgagtaatttcacgccgttgcaaagattcgactaaacgcgtctgagccggaacggtttttgccacaaccatcaggccagtggtgtctttatccagacgatggacgatgcccgcacgcggtacatcggcaatgggtggatagtaatgaagcaacgcattcagtaccgtgccatccgggttacccgcgccaggatgtaccaccaggtcgcgcggtttattaatgataataatgtcttcatcttcatagacgatatccagcgggatatcctgcggttcaaaacgcgcttcttcttcaatctcagcgttgatggcaacctgctcgccacccaatactttttctttcggcttatcacaaactttgccgttaaccagcactcgctggtcgaggatccattcttttattcgcgaacgtgaataatccgggaacatttcggccaaagcctgatctaagcgttgaccgagttggttttcggacaccgttgcagtgagctgtactcgttgtgccatatatactgcttcttcgtttatcgttggggttttacggctttgccgtttaatatagtgtgctattgtagctggtcttaaccgggagcaggaacagagaatctcccgtattacattttgaggaaagtcaaaacgtcatgacgcgcatgaaatatctggtggcagccgccacactaagcctgtttttggcgggttgctcggggtcaaaggaagaagtacctgataatccgccaaatgaaatttacgcgactgcacaacaaaagctgcaggacggtaactggagacaggcaataacgcaactggaagcgttagataatcgctatccgtttggtccgtattcgcagcaggtgcagctggatctcatctacgcctactataaaaacgccgatttgccgttagcacaggctgccatcgatcgttttattcgccttaacccgacccatccgaatatcgattatgtcatgtacatgcgtggcctgaccaatatggcgctggatgacagtgcgctgcaagggttctttggcgtcgatcgtagcgatcgcgatcctcaacatgcacgagctgcgtttagtgacttttccaaactggtgcgcggctatccgaacagtcagtacaccaccgatgccaccaaacgtctggtattcctgaaagatcgtctggcgaaatatgaatactccgtggccgagtactatacagaacgtggcgcatgggttgccgtcgttaaccgcgtagaaggcatgttgcgcgactacccggatacccaggctacgcgtgatgcgctgccgctgatggaaaatgcataccgtcagatgcagatgaatgcgcaagctgaaaaagtagcgaaaatcatcgccgcaaacagcagcaatacataacagaaacctgaaacacaaaacggcagcccttgagctgtaatgccagtcagttaagcaacttactggctctttttcggggctgtggggtatttccagggcctctcctttaccactctcgggaaggccctttcccttcttgtcggtaatttcacaagttgtcccatacttgcaagatcgcgcatcagctccggtatacgtcccggtgaagcgccctgcaatgtcatcagcattctcatcaccattccgcatgattctgagaaactcagttgattcggccagtaacctttcagatgttccgccattttaatcatctgatatctcaccagattataagccagtaagacaccccacagctcttgctccacaagctccggttttttacttctcagcgtcagcctgctcagttgcatcgtctgttttatctccctgtatcccagttcgatttcccagcgatgactgtacagatccgccatttctcctccggggaagcgcatggcgtccgtcatcgacgtcagcagatggcagacttttcctttgcgcgtcacggtcagcaggcgggctgtcacttcatttcccagtcccggccacttttttcgtgcctgcgggctggttttcagcttcaccagatgatcgcctttacccagttttctgatctcttcatattgcgctccctttctgagaggtatcatccagtggcggtgttctcccgccaggctccaggcatttaacagtcccagtgagtaataacctttatccattaacgtcagagtgttatcgccggtttgttctataagttgctcagcaagctcattttcgctgttcttcatcgtgccgaaggctgcagccgtcagcagatggctggtcagttccatctggcagaccattttgacctgcgggtagagcgccgggttcccggcatgtgtctggcgggggaaggctgcatcgttctctggtgtatccggtgtgcgccagaacacaccatcgatggccagcagggtcaggccgcaccagtgcggatgcggcgtggcgttatgccagagctgcgctgttttcgtgaacacgcggcggacagcctcacttcccaggcgctggcgggcctgaataacggcactgggagcaacgaaggggcgattgcccggcagcatgatgtccaggcgattcacaatctggtgaagaggttctttacgctcaagcgccatgccaacaatacaccagaccatcatttcgaggggaagacggcgcttgcgtagcgttacagtacctgattcggcaaggcaacgagagatgagttcgggatcgaggtaatcccccagagaagtcagtgggttacgcagagaatcgtaacgggataccagatcaagagcctgtccaatgtgcataaaaaaatccggaaacaagtgagcgtttccggattcttacacagccactggatcggtcaactgatccttaactgatcggcattacagcccttgagctgccgtttttttattctgtcagttgtgaaactgaagcgatttagtcgctatcgatctcatcaaatatggctcgctttgagatattcctcaagtaaaaaaacatctcttcctgcgatttctcacaaaaaagattcgttgacaaaaagtgacaaaattatgagattttcatcacacattttgacatcaggaacggtatgctgaattcaccaagacgggaagacaagaggtaaaatttatgacaatgaacattaccagcaaacaaatggaaattactccggccatccgccaacatgtcgcagaccgtctcgccaaactggaaaaatggcaaacacatctgattaatccacatatcattctgtccaaagagccacaagggtttgttgctgacgccacaatcaatacacctaacggcgttctggttgccagtggtaaacatgaagatatgtacaccgcaattaacgaattgatcaacaagctggaacggcagctcaataaactgcagcacaaaggcgaagcacgtcgtgccgcaacatcggtgaaagacgccaacttcgtcgaagaagttgaagaagagtagtcctttatattgagtgtatcgccaacgcgccttcgggcgcgttttttgtaaagctaacaaattgtttctattagcttatttcttataaacatccacaaactgtccacatcagtaatgatatacaagcccgcaaaaaatgcgggctttgtcttatgtagccgaaatggttgtggtaatagtcccccgaagccgctgcgctgctacctcaaaataatgatcactggtttctataccaataaattttcgccctgctttcagtgcagccacacccgttgtccctgaccccataaaaggatcaaggactgttccgccactattcacagtcctgaccagttccgccattagttcttctggttttccggtcgggtgcattttctttgacgggataaccgggtacgtcatgcagccgtcgaacggccccgaaggcgatttatctaaatggcctttgctgccccagacgatgtattcgcactgatgccggaaatacccggtatgtggtgttcgtgaccccctccccttgttccacgcaatgatgccgcgccatgtaaagccactggcctgaaacgcatcggttaaagctggtagttgtcgccagtcagtaaataccatggcataaccgcctggcctgactgcgcggtgtgcctgtgccatccataattgtgtccagtaagcccacgaacgggcgtccatgttttcacccgcgaacccatcaaagcggtgaaggttctcgccgttcagatattttgcatggctgccctggttggtgcgtccggccttgtgtgtcgcacccgaactgtaaggcgggtcagtgattaaggcatcaatgctttctggctcaatcagcggcaatatttccagtgcattcccacaacagagcgtgacattgtcagtctgataaaccttagtgtgttctggcgtatgtgctggttggtgctggattgcgatccccacggtcataactcctcatgtgtgtggggtgctcgatggctctcgttatctggttaagtgttttgcagcgcggacattttatttcaatgtagtgaaatgaggcgcgggcaagtagtttgttgcaatttttgcatcgtacattttgcgtcatttgcggcacctcttgtgtggttactgctgccgatatgataacaaatcgatcgtttttatcgatcggatttattgcatcgatctgttatgcctattgcttatgtatggtgccctcatttgtgagggtagcaaaaagaaaacccgcagtttttacgctgcgggtttgttgttcatgtctgtgagataggatgccgtttcgaccaaccttagcaaccgattgacgggggattactcccccgtcgcggttatcttacttattacatagtaagaatgccgcaatttccgtgccagcaaacctgaatcgtaactcgcacggtgatgtgtggaggatccagattatcgctaccgcagttatgcaaagtaacagggtttttaacggaatttgcgtcataacgcttgtctcctgagaggagaggcgctaaccttctacttgcgaaggtaagaagtgttagggcctcggttaaacagaaatgttttccggggcctttccacatctggccttcgggtattccctccgaccatcagccgaaaggcacccgcgcgtaatctatcgcttttttgttactccggcaattctgcctgttaattctgagataaaggcaaactcatctgattgtttcccctgtgtgaagctggcagatcatgccacgggataccttctgaagagtgaacgccagaggcgtgttttgatgtgaatttatggaaagcttccagtgttgagaagcatacgccgcattccaggttgttacactggtaatacttttgccgcacggtgtttgaatcattttccggacgactggtgcggatacgggcagatgcgccacaaagcggacaacggaacatagcgacctcccttaacgtggtgctgccgctattctaagttcctcactctgtttccgctatccattccgggatttttgcctcaagctcaagctgcgtggtaaagccgctgttatcaatggtgtgctcggcttttgcaataatccagtcctgattatcaatctcgcttttaaatcctgttaccgtgccatgcatttcgggatagagttctgcgcgtccacgcgccagcgtgatggagaatgatgcggctccgcgttgtagctgctgccactttgccgccgctgcgcgtcttgctgcctgctcgttctgataagtcttgcgtaacacaaacacattgccttccgcgccctccatataatcaccttcacggctgctgcttttctcctttttgggttttggcggtttgcggcgtttcacgctgacttttttctttttcccgtaattaagatcaagccagtaggcgcgtacccccgtatacgcctcgcggtcagcaatgcggaactgatggcgatcgccgctgctgcgtgtgatggcgaacgatggcaacggctggccctgtgcgttcacgccaccaccgggcatgatgaataacagattaccgctttttaccgtggtgattgcgcccagcatttccgccatgcgcgtaaggaaggacatgtcgctttcttcggtctggtcggcgtggtcgatttcgatatccatcagcatttcgctgatttgcggtttcagaccgtaccgatgagcgatggcggataccacacgctcaacggtcacatcatgccaggacacctcacgtttaacgttaaattcatcccgaaaatctgcgcttctggctgaaacagtcagcctgtccggcggtccttcgtgagcgatttcatcaacaatgtaagtgcctttttctgtcagcggttctcccttccagccaatgagaaccgtcaggcgcgcgccccgtggcggtagctgcaactgaccatccgcatcatccagcgtgatggtgagctggtccgcctcaaatccccggttgtcggtcagtgacaggctcatcaggcgctctgccacgcctgacagcgttttaccctccgcgagaatatcaaaatccggcattttcacggggtctgtgccctgactgagcaattgcatggtggtgtcggtcatctgttccctccctgtacggcatggtcgcatgtgcgtgcggagggggttactgctttttgttgtcgccgtggcgggagaatggcgcaggggtgagattacgcgcgtggtgggtgatgattgttgccgaatcatttaacggatacaaggggctgaagctatgagtgaaactcgttttcatggtgcccgtgttacggaaaataccgacctggtaacagcgattaacgatgttgattccagcgttatcggtatcgtggcaacggcggatgatgcggacgcgaagctgttcccgctgaacaagcccacactgctgacccgcgtcaatgacgtgctgggaaaatgcggaacaacggggacgctttatcgtgcgcttaaggccatcgcagaccaggtgagcacaaaggtgatcgtcgttcgcgtggctgaacacaaagaagaagacggaaaaacgcaggatcaactggttatcggtggttctgaatctgacggcagctatacggggatgtatgcgctgcttgttgcagagcaggatgaaagcatcggataccgtccgcgtattctggccgcgccggagctggatacggaggcggtgacaaaatccctgtgcgtgattgcgggtaaactgcgcgcgtttgtgtatgcctcatgtcatggctgtgacacgatggctgatgcgattacctaccgccagaaattcaacgaacgtgaggtgatgctcttatggccggacttcatcgcctacaacccgaaaagtggcaaaaacgaaacgttccccgcgcctgcctatgcgtgcggccttcgtgcgtacattgaccatgagcagggatggcacaaatcactctccaacgttccggttaagaatgtgctggggatgtcgaggcatgtgttctggtcgttgcaggccgaagacagtgatgccaacagcctcaacaacaaagaaatcacgaccattattcgtcgcaacgggttccgcttctggggcaaccgcacaccggaaacgaacgcctacatctttgaggtgtatacccgaaccgcacaggtgctggctgattcaattgcggaagcgcagtttgaaaccatcgatagtccactgacgcctgcgaacgtgaaggatgttatcagtgccatcagggcaaaactggattcactggttactgccgggaaactgattggcgcggagtgctggtatgacatcgtggataacagcaccacgaatttacgtcaggggcgtgtgcgtattcgctacaaatatacgcccgttcctccgctggaagacatggagctttaccagtcgtttactgatgaattctttggtcccgcatttgcggtgctgggaggtgcctgatggctgtaccaaaacatcttcgcttttttacgctgtttgtggatggtgaaaacgaagtgggtaaggtgacgtccgtcaccctgcctaaactgacgcgcaaaaccgacagctaccggggtggtggcatgatgggtgcggtaagtattgatctcggcctggacgactccgcgcttgatgcgagctttgtcatggggggcgcagttcgtgagctgttcctgaagtatggcggcacgattgacggcacgctgctgcgttttgcgggtgaatactacaccgatgcagaaagcgacctgtatgaagtcgaaatgcgcggacgtgtgacggaaattgatatgggggaagccaaacagggcgaagccacatcacacacttatgccattaaaaacacctactacaagctgagtgttaacgatcgcccgttgtgggagattgacttgctgaacttcatttaccggaaggacggcaaggacattgtgcccgatcgcatccgttccgcgcttgggcttggctgataagtaatatgcaggcggcgcagtgcgtcgcctctgactgaaaggagtttcctgatgaaagagacgaaaaacatcgataccgaaaacacggtagttactgacactgtgaaagaaaccagtgagcgtggcgtaaaacttacccaaccaattgagcgaagcggcgaaaaaatcacgtatgtggagatcaccggggctattgagcaggctggatctctgcgagatttgtcgctgtctgatgtgctgagtctgaaagcggaatccatgtttacgctgctgtcacgcgtgacatcaccgcgactggatgaagtgacgatcaaaaaaatggcatcccgtgactttattcagttatgtgtggttgccgtaaattttttgagcggtgcggactctggcgggaagaacgaacaggcgacggaagcctgatcacggttgtgtgctttgagcacatagaagactttgtggcagatattgccgttatttttaactggtcgcccgccgaaatcttcatgatgacgcccggcgaagtggttagctggcgtgagcgggcggcacttcgcagcgggaatgcagacaatgaagactcttgatatccgggtcgctttcagcgccgttgacaggctgacccgacctgccgaaaacgcacgccgcctgatggggcagtttggtgactccatccagcgaacgcagggggcgatcaaaaatctcgagcgtcaggcgcgttcatttgagcgcgcccgcgacgctgtcagtaaagcggatgcgggtatcgtgaaagcacgacgccagcttaacgcccttaatcagttacaacgcacgggtacagtgctcagcgaaaaacaacaaaagctgatgcagcagttaagcacccggcttgaacgcctgaatgaatcgcgcacacgggaaattcagaaaatgcgggagcttggcggagagctgaaacgccacggcatttccctgacaggcagcgataacaccatccagcaggccatcagacgcaccgaacatacaacaaccagcttgaacgcgaacggcaggcgcttgcgcgtgtaacgcgggcgcgtgagcggtattcgcgcgcgcaggaaacagcgggaaaactgaaaacaggtggtgcgctggcaattggtgcggcagcggcgggcggctatgctgccgggcgttttttgcagcctcgatcgggttcgggaaagagatgtcccgcgttcaggcactgacgcgaatcgacaaaaacagcccgcagtttaaggcgctgcgtgagcaggcgttaaaacttggctctgaaacgcagttcaccgcaggcgatgccgccagtgggcaggcatttcttgcaatggctggcttcacaccgcaggccattcaggctgcgcttccgggcgtgctgagcatggcaacggctggcggtatggaccttggcgagacggcggatattggctcaaatatcctgacgcagttcggcctctccgctgaccagatggaccgggtcggtgacacgcttacagcagcgtttacccgtactaacactgaccttcgcgcgctgggcgaaaccatgaaatatgcaggtccggtggcgggtaagctgggaatatcgctggagcaggccgcagcgatggcgggcgtgctggcgaatatgggtatcagagggagtgatgccgggacggcaatgcgtgccagcctggctcgtctggcatcaccgccaaaggcggcagcagaggcgctgaaagagcttggcgtgtctgtctcggatgccgggggcaaaatgcgcccgatggaggatgtgctggctgacctttataaagctacccgcaaatacggggaagttgaccgggtatcgttctttaaggacattgccggagaagaggctttcacatcatttatggccctcgttgatgcggcaggtgacggctccttacccaaactgagaaaagaacttgaaggcgcgcgcggtgaggctgaacgcacggcaaaggttatggccaacaaccttgacggcgatctgaaatcactcagcagtgcatgggaagggttgcgcatccgcattgcagatctgattgacggtccgctgcgttctgtcacgcagtggctcacgcgtgtggtatcaagggtgacggcgctggcgcaggcccatccgacactgacgcgccagctactgatagcaggcggtgcgttgctggcaatgactgcaacggttggctcgttgtcgctagctattggtgtgcttgctggcccgctggcaaaactgcgtcttggtttttctctcctgaccggatcaatgaatgctgtcagggtcctgccagcactatggggaatggtgacgggttccgtttctttactgggaggcgctatcggggcgttgttcagtccggttggtcttatcgtggctgcgcttgccggagctgccgttcttatctggaaatactgggatcccatcagggcattttttgccggggtgttcagcgggattatggaaaggctgaccccgttgcgcgaaacctttgaacggtttggtcctgtttttgacgcaatcgggagtgggatcagccaggtgtttaactggtttaaatcgctgctgtcaccgatggagtccagcaaggaaacgctggataaatgtaccagtgctggcgagatattcggtaacgttcttggcggtgcgttacaacttgttctgacacctgcaaaaatgttgctggatacgctggcgtggatacttgaaaagctcggtgtgcttccggatgaagcggaaagggcgcgcaagaaaatcgaagacgcacagcgtgcggccattcttcaggacaaggttgccttgcttcagggggacctggcgaaaatcaatccgccgaagcctgtggaaaatggcaatggcaccggaggtgataaacctaaagacaacaaaccgctcacagacagcaataccggtacgctacgcagactcagcaaaattgctgataacacaggtaagctggttgatgagacgaaaaaacgtattggccccggcgatattgtctttaagaacctgccccgcgcacttgccgttcgtggggagtggcaggagcggaagattgcgcaggtcagtaagcctgcccccgcaattaatatcacacctgtggttccggctccgctgcctccggcgctggtccctgttgttgcggccagctctcgcccggtggcagaggccatacgatcgccagtggcatcagttcctgcaacttcccgtaaccgggagcctgttgcctccggatttggcggtgaaattcatgttcatctgcataacgttgttacacagaatccccgcgaactggcgaaactggtcggtgaaatggtcagggcagaattggaacgacgcgaccgtgccggacgtggcagtttttacgataaagattgaggagtcatggccatgatgatgatctacggcatgtttgtttttgagctgcgcacattgccgcatcagcagttacagcaaaataaaagctggcggcatgtgaaaaatgaacgcgttaaccgttcagcaagctggcagtatatcggggcaggcgatgatcgcatcgtgctttctggtgtgctttatcctgaaatcacaggtggcgaagtgtcgctgtcgctgctgaccacgcaggcgtatacaggacgcccctggcctctgattgatggcgtcggacagatttacggcatgtatgtactgacggaacgaatacgacccgttccgagtttgatcgctacggtaaggcgaaaaagatagaattttcactgacccttgaacgctgtgatgaggatttgcgggagcgcctgcaatcctcatcgttcagcgatatgctgtccggcttcaaagataaggtgacatcatcccttaacagcgcggccagttcagttaaagggctgttctgatttaacacaaaaaccgctaatggtcagattagcggttattttgttttctgactcttctctattgttccgcttgattctcctgcggggtggtaacgataaatcgtcgatgtaccaatgccgtaaattattgccagttgttttctgtcgtgaccgtttttaatcagccttgctatttgctcatgctgttcttttgtcagcttcgggcgacgtccgcctgtgcgcccccgtgcgcgcgctgctgccagtccggccagtgtacgttcaacaattaattcacgttccatttcagccagggcacccatcacgtggaagaaaaaacgccccattggagaagatgtatctatgctgtcggtcagactgcgaaaattaatccctcgctcccgtagttccccgacgagagaaatcagatgtttcatgcttcgcccgaggcgatccagtttccagacaaccagcgtgtcacctttttgaaggcgctttaaagcgcgttttaatcccggtcggtctgtctttgtcccgcttaatttatcttcaaatatctgttcacatcctgcacaaacaagagcgtttcgttgcaggtctgtattctggtcatttgttgatacccttacatagccaatcagcacactgaatctcccgtccaaaagcgcaaatcatgccatgcaggccagaaacggccattatctaaaacctcggtttacaggaaacggtaaatcaggcttctggtgcattacagaaaaaacagaacggtgcagatattccgaataaagataaattcatacaaaacacaggggcctgtcgtgcatttagcggtcagactgatatcgatggttcacaaggtgcatggtcgacagttgcatttatctcgtggctggagaataacggagctttccgacatccatactggatgtgtaaagggtcatggtcctatgccagaaacagggttattacggataccggttgtggaaatatctgccttgccggagccgtgattgaggttatgggaacccgcggcgcaatgaccatacgcgttaccacgccgagcacgtccagcggtggcggaattactaacgctcaattcacttatattgatcatggtgatgcttatgcccccggctggcgacgagactacaacacgaaaaaccagcagcctgcatttgctttagggcaaacaggaagcagggttgcaaatgataaagctgttggctggaactggaatagcggtgtttatgatgcagatatcagcggtgcatcgacattaatcctccacttcaatatgaatacggggagctgccctgctgtacagttccgcgtgaattacaggaacggcggtattttttatcgttcagcgcgtgatggttatggatttgaggctaactggtcagagttttacaccacgacccgcaaaccctctgcgggagatgttggtgcatacacgcaggcagaatgtaactcaaggtttattacaggtattcgccttggcggtctgtcatctgttcagacatggaatggccccggctggtctgacaggtcaggttatgtcgttacgggttcagttaacggaaaccgtgatgaattaattgatacaactcaggcaaggccaattcagtattgcattaatgggacgtggtataacgcggggagtatttaacgatgatgcacttaaaaaacattactgctggcaaccctaaaacaaaagagcaataccagctaacaaagcaatttaacatcaaatggctttattcagatgatggaaaaaactggtatgaggaacaaaagaatttccagccagacactttgaaaatggtctatgaccataacggcgttattatttgtattgaaaaggatgtttcagcaattaatccggaaggcgcaagcgtcgttgaattacctgatattacagcaaatcgccgggctgatatttcgggtaaatggatgttcaaagatggcgtagtgataaagcgaacttataccgaggaggaacagaggcagcaggcagagaatgaaaagcaaagcctgttgcaacttgtcagggataaaacccagctatgggactcacagctacggctgggtatcatttccgacgagaataaacaaaaattaaccgagtggatgctctatgcgcagaaggtcgaatccacagacacctccagcctgccagtaacgtttccagaacaaccagaatgaaacaaggcccgctatcgggccttaatttttattcaggcttttgtggccattcaggatttgccgtatccacacggctgaccagaacactatagcgttcccatgactccagtcgtgcgcgttcctcatccgtcgccatattcagcctgacagcgcgttccagtggctgaataacgttttctgcttcggaaagtaacgcggccttttgtgattcggcctgttgttgttgctcgtctgccgtataaatccgtttaaccacagctccgtccttaaacatccacttaccggaatcatcagcacgacgattagctgtaatatcaggaacctcaacgacgctataaccttcagggttaagcgtggaggcatctttggtgatggcgacaataatattatttgcatcgtaaacaatctttattgtgtctggctgaaagtttttcacttcctcataccagttttttccgtcttcggaccataaccagataacatcaaaattctttgttagctgatattgttcttttgtttttggatttccagacttaatattttttaaatgctgcataatttacacctgtgcgacgttataccatatgccattgatgtatttttgtatcggcctgaagatagcttcatcatcgccatcaacttcaccaataatccttaatccggtaagtgcgtgtccggctatttcataacgccctccacgcgccatcaattgaacaacacgtgtgccaagtcggacatctctcacatagcgtgagtcaaaattgccataatttccgggaataatttgcgcaccgcaaagccagttaccgttattgtccatgtacgcctgaccatcggtgccattggctgtccttgagttattaatcatgtagatgccaaattgcttatttcccagaccgccaatcataaatttgcggtcggcatggtcctgacggagcaaagcctgagcaccatcagtggataccgcattacgtccaaaaataacattctggtcacgcatatgaatccacatgcctgtgctgctgttaattgcaaggcggtttgcgtacacccatgcgttagttgttatatctcctgtaacatccagaccatgccccatatttatgcgaccagttctgagattaagcgtaaaggggcgtagcggccctatatcgccattttccccctcattctctcgtgtagggatgatatgcaggcattcttcagaacggcgaaaaatggcaccaaaagatgaattaaatatcctcagtgcattgactgtcgatatttttacttcactgctgaaaagggctttaacaagaacagacaaagcatcccatttaagattcatcaggtcttttgttgtggtgctttgtttgcttctccatttgaaatattcattgccgttgtcgcctgtttcaaaccacatgtatgaatcagtatcgctgtcggcatcatttttaaatccaatcttcgcccagtcagtatttcgaatccaggcaaggattgagtcgttttcaaaagtaagcccaccggacaaggtatcgccattcttttgcacggcgttcctggccctgtttaccgtttcctgtaaaccgaggtattcgataacagcggcaacggtcgatttcgcaagaatatcccgcccgacttttgtcagggttgccaggctggcgacatcattccccgtaaaatacggaaacttgtctgccgcagtagcaagcccggccagcgccgtcagggtggcatctttcggttgcttacccgcaagcgctttagtcatggtggtcgcaaaattcgggtcgtttcccagcgccgccgctaactcgttcaacgtattcagtgcgtcaggcgacgagtctacaagtgcggcaatcgcggccatcacataagccgtgcttgcgatctgagtattattagtcccttttggcgcagttggcgttgttggcgttccggtcagtgcaggactgtttaagggcgctttcttgttcgtttcatccattaccgccttaacagcttttggcgtcgcagccagcgtttcagatgtgctgttagtggcgctgctaagttgaacaaagccttttgcggtcagcgaggcgtccgggtgacgtcgtgactgttcatgctctttcagtttgtcatccacgtaatccactgtggccattaccatggtgttatccacggtaagcgccatagtggcagtgctggatacggtcagaatggtgcgaaatgtttgtgcacgtcctgacccttcggcaacggttggcttgtaactttcggcagtattgcctactgcgattaaatcgccgtgctcatcaaacacaccaatttcccggatccagaatccgcccgtttctggaggaacaaccagctccgcaataatgcggttctgatgtgttgcgtccaggaagacgcgattaacagtgtgtcgccacacctcatgcaccagacgggtctgcttactgtctggcgagggtaaagtgccgccgccgtcacccacggccatatgagtcaggcggacaggcttaccatctggcgcggctgcctgagctaattttttggcacccgtattggtgataacggttttaaatttacgtgttgtggtactcatgcttaatcgtccggataaatggtaatgacttcaccgtcgtaagttgctgccgccgcgaaaatatctcccgggatctcctgaatgatattcagccctgtcatgtggcggctgaccgggcgggcatcagcaatcaaccgctccatttccagatacatttcctccgtcacgccgctgtccagtgtgccgacttcaacggtaaatgttcccggttctccgccgaactcccaccactcagacacgcgaatgaggtatcccagcggctcaatggccctgcgcagtgcgctgatggtccctttgtgtcggtgtatcagccatgcatcacgaatcacctgtcgttttgcctcttccggccagttgcgatcccaacggtcaacggaaaatgcccaggcgagataaggcagcaggtgcaccgggcaggtgtccggcgaccacagcgtgttgaggtctaccgggatgtctgtaatgcgcgttccgacagcttcggcacaacgcatgaaactgctggctgatggtggtaacagtgaattactcattgcgcccaccttcgctgatggtgaacgactcacagcgcgccgcctgtatgtcgctgatggccatattctgtgtgggttcgattatctccacgcgttgcacaccatgcacatgcagtgcggcagcaatggcggacaacgccacgtcctgaccgataagcccctgctcagccagccacttcctgaacgacgattcagccgcagccagaataggttcggattccgggccagggtaaaagtacagttttgcattcagccgccatgtcacgattctggcgctctgtacggtcaggcggtcggccaccgggcgggtgtcctctgcattcagaacggcgcgaacggtattaagcaacgcctccgttgctgtgccgtcgccttcagtggacagaatggaaaccgtcacatttgccggagacggactgatagcccgcgcatcacgcaccagaccgctggcgctgcgtgcaaaatactcgtatgcacctgacgggccagcaacactcaggccgtcgtacgcccgctgcgcccgcagtctcagcgaggtgtcgctctccatcaccgcgtcggtggtatccgttgccggagtgataaccaggcgttttgtgttcatattgcccgcgaggttgtccaggtctgtcccggcgctgtggcttaacatgcaggcgcgtgccccctcgttaacccgctggcgtaacagcatttcacgaaacgacatggtttgagcgataacgttaaggggttccgattccagctccagcgcggcggaaacggcttcacgctgttcggcgggataagccgcaatcatcatggcctttgtgtcagccagaattgcctcaaagtcaggctccgcgatgatggcggggtccggtaactgtgaaaggtcaacggcgggcatgatttactccctcagcgtgatggttaattcaacattctgcatggtctgcatgacagtgcccgacagcgtcaccccggcgcggcctcccgctttccagacaacgtcgatggcatccagggcaatgcggggttcccatcgtgtcagcgcaatcacggcagcactcatgcattgcagacgcgtggtgttattcatgggttcgtcaatcaaatcaggcacaaggctgccatattcccgtcgcataacccggcttgccagtggggtggtcaggatgtccctgactgactgtttcaggtgctccatatcgttcaggtttcccgttccgtccgggttcattcctgtgtagcgggttgtcactgcgggcctcctgtcgaatcgctgccacctttcacgccaccgtgtttatgcgtatgcacggtaatgccgtttgaggtgaaatcgccgccgctgtgcgtgatattgccgctcatctttcccccttttgtgacgtcaagcgtcgccgttctcagaaggtttgtgcattccacgacgggcgtgtccagtgtcacgctgacggatgcctgtaaagtggccgttttcatgccgctggcgctcagtgcgcctgcgtccgcgtcgtagcggaacaccgcgccgtccggcgcgctgatcacgatttctttcaggcttttgccgggggccggattggcatcactccacaggctgccaattatcatggcggtttccgggttgccgccaatgcaggcaattaccacctgttcgcctggtgatggcggcagccacacattgaaggctcccgcgcgcgtggtgttccagcgcaaccagcctgtctccagttcgccgctgcgaacgcgcacgcgccaggacttctcatcaacttcagagatgatcccggtgcggatgatattgctcagcagtcgcatgagttctgcgctcaccgtacagcctccgcaatccggcccagcaccgtgttataaatcaggcgttcatctgcctgactgatgcccaacagctcacgtaccgggtaatcggtgaaaatgcccggcgcaacctgatcgcgctcaccgaactgatgaacgcgtgcaatacgtgcagccacgccgctgtaacccaccgtcacaccggaagtatccgcacgggctttcaggtagcgggcggtgcgcagttttacgaacatggggacgcgctttgtgctgtcctggttgatgcgccgggtgcgtatttccagaaagcggtcgatgtcatcccggtaaaacgtgcggatgttgtttttatcctcatcccacccggtgatggttcgcccgtatttccccgtgtcgtgatgccagtttttcagcgtgcgtgcttcgttattccagataaagcgaatgcgttcctgtatccgggttacgcggcgtctgcgtggtgcccatgcggtcccgtccggcgctttctgtgaccggatacgtgcctgctgggtgcgacgtaaatcctgtgccagctttctggcgatgttattgatggcctgctgattcaggctgtcgcggatggcctcaaaggtttcatccacgcgggtgaatgccttatccatcgctttcaccccacgtcacatcctggaatacatgcgaccagtcgccttcggaagatggcaggcggggttttggctccggcaggtgttctgcctgcggtgtgccctgactgctgcgcgtgatgcgaacgcgttcccgcaaggggagcgtaaacaggagatcggcgctgtcatcgtcattgataacggcggagaatttgatgtcctgattacgctcagggttgagcaacaactgtggctgattttgggataaccacgccagcagcggcagcgtgaggtcatccagctccccggcgtaatccatgacaaacatcaccatctgatagcggtaaacaaacgatggggtttctccggtcgtttcaatgttgccgctctccacgaaaatggtgaatttttccgggttggcctgacaccatcggcatgaacgggtcatggcttcacgcagggaatcagttttcagcatggttgttatcctcgttgttcagtcgttgcagcctgcgctgttccagtaattcaatggcccgtttatccgcgttacaggtttccagtgcatccagaaggcggtcgccccatataccgagatttccccatgtgggagtatcagggaaggggggaggcgttaccggtatggtcagcgtctgcggtataagccggactgacggcgctggccgtggcgcgttctgcgtgcctgcgcagcctgtcagtaaaacgagcgtcaggcaaagcgtgggcgcattcatcttttgcaatatcgttgcgtagctgttcacgtcttacctctccgtcctgattgcgttgctgattttccacgcggagttgcgccagcacctgctgcatatcctgtaccccggcgctgataatattcagggtgtcggcggtacttttcagggtgctggcctgcgcttcgtttctggcgttctcccggcccagcgaccacgacagacgcatggatgttccccatccagcaatcagaaggaaagcgacgcccagcgtgggccagagcttcatgccggataggctccgtgtggtaactgaaaatgcggtccgtctttcagggtcttccagtcgccgccccattccaccggaatattcagttcccggctggcctgtctgaatgctgctgcgattttttcgtacagcggccattcccatgacacctggctgccgatataagccacaacatccacggcatgccccgtaaggtggcggctgttcatggtctggctcttacccgtggccaccagttgcttctggcggtaacggctgcgcaacccttcggtgataccaaaatccacttccgagatttccagtgcccgtcgggtcactttcaccagatcaggatttacgccctgcaaattcttttcgctccggctgctgaatttaaatgtgttgctcattcgtccttctccttcaccctgcgattaaaggccgcaataaccttgtcgcgtgctttctctgcacccataaaaccgattgatgcgccgataaacgtcacggcatcttcaggaaacccgaagaagcgcaacgacccggccacggccatggcaagaacgccgcacgccagcgatcccgttacggtctgaaccagtgttcgtccgtcataaagactcatcagcgcggaaatgctgaccgccgcgcctactgcatacaccgttggcaggtggtcaaagagccacgcaataacctgctctgtgatccctgtttgaatggtgctcactgctacttcccccacaactgaatcatttctcgtttcttcttctccggctccggcatctcaacttcctgcccggcgtccagaaatacctgctgacagagtccggggttggcatccagcaccttttcggtgacgccctgcgtcgtgccgtagtaccggaaacagagcgaatccacggtgtcgccttccagtgccttcactttcatcagcacagctccgcaaaaattcgcgggcggcgcagaatgtcagagatggcccagctcacatcgcgccacaaatccgatgtctgtatatccagtgcgtccgcccggcggtcgcccttatccgttgtgtccgcatcgcggtaacgctccagaatcagggcgcgtgtggcggtataaacggcattgcgccagtgccagagattgacgctttctccgttaattacgggtgccggaacatcggccagcgtctgatggccagccgcctgctgttccttctgccacgcttccagctcgcgggtaacgtgtgccacggccccggtggcggtatgcagcaggcgggaggtggtcacacggcccggcagtcgtatcgccagacgcagctcacgcagcacaatatccggccagaatgcgcccgctgaaatacgggtatcaccatcatcggtatcggtgatgtcgtcctctgcggggccggggttggttctggcaaccatactcatggggttcactcctgaaaaaatcgggcggtgggtgcgcggtgtaaacggtcacggagtcaaaccggaacaccgcgcacgccgcccgctgacggggtcagtcgttaaccgcgcttcgccttctgcgtcgcggtggtttttcgtgttgcaggcttccgcgttgtctttttacttttgctgctttcgtcctgcgcctgcggtgtgctggcatcttctggtgcggctgcggaatcggcttttttcagggcgcgggaaagggttgcaatctcgcgtttcacacctgcgttcgggttcaggtgcatcgcttcgcgcagcagcttcagtgatgaggccatgctgtccgcatcggtcaggccacgacgggcaaaggcgcacgccttgcataatttggcgcgcacttcgtccggcatgtcctggtcggtgacaatctcccggagggtgtccagtggttcgataaaggcggacaaatccgcgtcggcatccgtcccggcctgcgtcagtaccggattacagatttcttcggtcagtaccgtggcggcagtacgtccaaagttatccggcatgatgaggttgtgacggaccacatacgtaccaatacgcagcgccagcggaagatcgccgcagtcaattgcccacaccatcagcgtggcaatcacttcatcctgctgcccgccgtcagcctccagcgttccttcaatccagccggaaaagtccggcaacaactcttttttgatggcggctttcgcgcttctggcctgtacgcccttaagccgggcctgtgccagacgcagacgatacagcacctcttcatgcgcggtacgcgcggcgtggtccacgccttcattcgcccggcctgcgcgctgtgccatcacgttctgccagtgttgctgtgcaggagtaatcattttttctctccgttacaggcgggcatgattcccgccgtgagttgattagctgtcggcgaacttcaggccagtgaccatcgcgcacttgccatagtcttcaacgacataagcgtcattgatggactggtaggtggcgatgcggttgtattccggttcgtctttcatcagacgacgcattgaacctttctgccagtaaatcgacaggttgttgaacgaggtgatcagcatcgttgcatccgggaagaatggcgcaaggaacacgcccagcccgccaatggtgcgcgatgacaggatgagctgcccggcaagtaattccgcattgggattctggccgctgatgctgttcagcacgggcagacgcagcgagttaaacagattgcgccccataatcaccacgaggtcgtcagcttccttgtgccattcatccagcagggatgaacgcgcgtcctgtaccagtgcatcagcgttcgcatacttacccgcgtgcgccacggtgttgtccatgttgcgggaggtcagcgtcacgtcattcataacgcgttcgctggcgtcggttctgatgtgctccagccatcccacgttaacgtcctgaagcagcttgttggtgctgaagttggactcatccgcgtgagacgtgccgttgaaaccgatcatgatgcggtcaagcgccacctgtcgggcaatctgtgcgctgatgcgggactgaaaatcagggtgtgccgaccaggcatcaagctgcggatacgaaataaacgtgtcgtagttcacctgttcgcactggtatttgcggtttttcagatcaaccacgttattcgggttacggcgttttgttccgtcataactggtattcgtgcgtgcaattggcccggtggtgtccaggaggattttttcgcctttctggtcggtcacgccgatcacgttaattctttttgtaaattcggtgctttcctttgaggcgttttcaaaacgctgctgtaccgagggttccacggtaaatcgcgataccagtgcggaaaccgggatattgttaagcgacgcctgctgcgccatatagcaacccagcttgttgcgggtaatatctgacatcaccagattcataaaaaatttgctcctttgtcttatcagaagtcagccagctggtcggaggctgcgcccgttgcggtgaaccggttctgcggatcgccgtcctgcgtgcgcagtttttccttcagtgctgccagctctgtggtcagtgaagtgattttctggctgtcctgctgatggcgggtttccagtgcattaaaacggtcgataatgtcggcctgtgacgttgcgacgccttccaccgcttcctgaatgcgggagaaactggcgtcatccgctttgcggccacggccaataatccccattacgcggttaaaccactgggtgccttcttcctggcgttgttcggtgagttcgataagttctgactccatagcggcggtaaacatcgccacgtctccctgctgacagttgaatgtcatcagttgcatacgttgttgtgccgcaaaggccagacgttccgtgcccaggctggcaggggtgtcggtcattgccagcccgcgcaggtaagggcctcccgtgatggttgactgtggttccagctcaatactggagtaaatttttttaccatcgttaagcagggacatcatgcgagcggtcggctcaatttcggcatacagtgccgtgcgacctgccagcgggccatcggttatgtcttcggtgctcaaccccacaacatcgcccatagcggaaaactcgctaccggggagtggtgacaggatgtgctcaatattcacacgtgcaccataaacggacgggttataactggtggcggcagctttcagcatgtcgccgttgatttcgcgcccgtctgccgttacaccggagacagccacgcgaaactttttgcgggatgtctttttttcattagccatagtttttgcccctctgactggttcttcagtcatgatggcaaagcgtaacaggctgatacaaagggcttttgttgtaagaaaacggccagaacagggggttaaggagaacggtttcgcgcgcgggtaatcttcctgtaattactcagggggagcaatgattcaggacgcttttgtgcgccagcgtgcgcggcaactttactggcagggttatccgcccgcagaaatatcacgtctgatgggaataaacccgaacacgatttatgcgtggaaaaaacgtgaccagtgggatgaaacgccacccgtgcagcgtgtcacgcagtccatcgatgcgcgcctcatccagcttactgaaaaacagaataaaacaggtggtgacttcaaggaaatagacctgctgacccggcagcttaaaaagctgcatgatggccagccggatgtgatggccgcaggaaagaaaggccgggcgaaaaaactcaaaaatcatttcacgccggaacagattgccgcactgcgggaaaaaatcatcagcaggctggagtggcatcagcggggctggtttgactccctgaccctttgcagggaagccgggatacgtaacaggatgatcctgaaatcccgacagattggggcgacctggtattttgcacaggaagcactgctgatggcgctgcgtgacgatgtggcacaaccttaccagcgtaaccagatttttttgtctgcgtcgcgtcgtcaggcgttccagtttaaaagcattattcagaaggctgcggctgaagttgatgtggagctgaaagggggcgataaaatcatcctctccaacggcgcagagctgcattttcttggtacttctgctgcgacggcacagtcctacacgggcaatttttattttgatgaatttttctgggtcagtcgctttgctgaactgcgcaaggtggctggcgctatggcaaccctcagcggactgcggcgcacctacttctccacgccatccaccgaaacgcacgaggcatacgcctactggaatggcgaccgctggaacgagaaaaaggccacgcataaacgccagcgtttttctgtggactggaaaacgctgcataacgggcttatctgccctgaccggacgtggcggcaaattgtcacgctggaagatgtggttaatcacggctggaaacacaccgatattgatgaaattcgtgatgaaaacaccgaagacgagttccgcaatctctatatgtgtgagtttgtccgcgaaggggaatcggcatttaacctgaatatcctgattggctgcggtgttgatggatacgacgactggaaagactggaaaccttttgctccccgcccgatggggaatcgtccggtatggattgggtatgacgcaaacggcagcagtggcaacggcgacagcggcgctgtgtccgtggtggttcctccggctgttcctggtggccgttttcgaacggtggagacgcgacgcgttcaggggctggagtttgaagaacaggccagagtcattgaagagttcacgtatcgctacaacgtggaacacatcggcattgatgtgacgggcgggaacggggaggctgtttatcatatagtgaaacggtttttccctgcagctattccgtacaccttcaccctgtcatcaaaacggtcgctggtactgaaaatgctgcaaataatgcgtgccgggcggtgggaatacgatcgcgccgaacgcgagctggtcgcggcctttaacgccgtgcgtaaggtgaaaacaccgggcggctttatcacttacgaaacggaccgtgcgagggggatcagccacggcgaccttgcgtgggcaaccatgcttgctgtcattaacgaaccgattggcggcgaaggagaaaacgagcgtttcacggttatggagttctgatgagcagaaaaaataaaaaattgcgcatgagttcacgcattgatctcgctgatgcgctcaggaaagaatcgtcgctcagtgcattcacatttgatggtccttaccgcctgaccgggcatgacctgctggacaatatgtactgtgctgataacggtcggtggtatgaaaccccggtggactggtacggtctggcaagagctgcccggcaaacgtcctggcatcagtctgcgctttactttaagcgcaatgtattactcggttgctacatcccgcacccgctgctttcccggcaggatttctcggcgctggcgctggactggtttgtgttcggtaacgcattccttgagcttcggagcaatatgctcggcgaaccgcttaaattacggcacgccctggcgaaatacatgcgacgcggaagcgatcttgaatcatggtggtatgtgcaggatggtaaggacgcgtttcagtttcgccctggcaaagtgtgccacctgatgaatcctgacattaaccaggaaatctacggcatgccggaatatctcggcgcattactctcggccagcctgtctcattcggcggacatgttcagaaaactgtattacgacaacggatcccacgccgggtgcatcatctacatcggtgcagcgcaggtaaaccgcgaaagcatggactccctgaaagaaacgctacagggtgcacgtggtggtggtgcgtttaaaaatgtgctcattcatgcgcccaacgggggcaaagagggagtgcaaattttaccgttccagcagatcaccgcaaaggatgagttcatgaatgttaaggcggcatcccgtgatgatgtgctggctgcgcaccgcgttccgccgcaactgatgggggcgatgccgggcgaaaaaagtgcgtttggcgatgtggagaaggctgcgcgggtttacgcaattaacgagctgatgcctgtcatggaggccatgaagcacatcaatgactggcttggcgaagaggtgatccgctttaacccttacgcactgttagacacccagcccacatcctgacgcgcttcgcttgtctgctgcttcgccggggcataaaaaatttatgccccgactctccagctcctgtatcagtcagataatttcacgacgctttcctgctgattgccatcatcgacagtcagactcttacgcaatcccaccgcgttgactgcatgttctcgccgtctcagtgcgattttgacggccttacctttcaccccatcaaatcaaaagctctcacgtctttttcacgctcagcgtgagaaatacagccattctgttgtatctctgcgacatcgttcagggaatgctatttaccccctgaaacgcgggctgttcccccgtcacctgcgcgcagaaaaagtgtgtttttttgtgcacgcacggatccttgacggatccagccgccatgcgggccggaagggtaaaaagtcgttcaaaaaaattgtgcaaatttgtgcactattgtgcattgaaataaacgccctggaagagggcgttttggctcatttctatagctttgatgcaggctgggctagatgtaagggttggacataccagccttttgataaccaactctctgcaacatctttactccttgttattgctggtattccgatgccgttatttacatgcatccatgctactggctctgcttccagcgatgccagtgcaatttcataagcacggcgttcaatattgtctcgaacgtccaggctgccgatgcgctctttgatttctttaatcagttctttgtcggtgaacgttgtcatgtgttagtccttatcctgctgtgctttcaactgatgaggggaacaaaatcttttcatcaaatccggcattcatatcatggacagcaacacaccaatccatcgacgaacgattatcaagagcctccatgatttcatccatgcggcgtaggtcatacaggtaaatgtttttatcgccaatggtgtaaaaaccaatttttttcggtgatggacagcgatcaagaacgtcctgtaattcgttcaaccatgcctgttctttttttgtcaacgttgccatatcagttttccttatacggattaattttattgtgcaatgtgttgaacgacgcccataccacgtcgttatacaattcaataactggctcaattattttcccgattgcccagataaaaattagcggggatatcggtatcatcaacacgataaacagaatgagaaacagaaattctattgctctactctttcgcggatagtttttcctgaatagtgtaggcacctcactctcctttaatgcgaaagtggtttttccagcggttttgcgccgcgctgggctttttgcaaaaaccgcaatccatcatcccgtaatatttcatcaaccccattcgtcggttgctgagtctcacccactgccatacgcctggatcgtttctgcgaactaacagaatctttgctttacggttgttggttgccatatccccctcccttgataccaatatttacaacatggcaagcctctttgagcacccagtcaacagcgtctttccatgctccggtttcgactggcggattctcacgctttaccagttcatagaaacgtactgctctaaccagtccatctgacggttttgcctgtagtgcagcctgagctatgcggtatgcctggagtatacgggcgtcgttgatatccattccgaacggaatttctgatgattgtgattctgcatcttcaagcctggcaatttctttacgtaagaagtatttcaactcttgtttttgttttctgttcatgcgttttttccctttttgtctgtcacttctctcctgataatttcattgcacaaatccacgcactcattgcagatgtaaacagacggtccagcaatcacctttgtgacttcgtactgggatttattgcagaagctgcaataaatcgtctcctcacctgaagtccatgttttgctggtttcgccagacatcagttgtttgaggtctttttcacgacgaagaactatctggccacattcagctattttttggatgttgacattttcttctttcgccagcgcttccatccgctcaatcagtcgctgcgctttttctctgtcaatgtgttgcattgtgtcccccttgtttatgctcccgggttaaagtcatcagggcggatgcgccctgatgttgtgttattcgggaaataacgcccggatatttccggccatctgactggttatctgtgcggctgatactggctgtgacgcggggcgttctgtcctggtttgtgtcactgataacgcctcatcatcagcccatgcagccagtcggtaagcctctgccggattcattttcagaagtgccagcccggccagaaaagccacgcgttggccgcttttgcgggcttctggtgtaaggctgtccagccaggcgcatgcttcgccttcgttcttgacggcgcgggcttcagatagaaacttatccgtctggttggtgtcgtcattggtttactccttgtccattgcgtacagcccattaaccagagcaaactgtggcaccccgtccgcgatgaaagtcgcattaactccgcaggcttcgcggatagcgggtgccacaatctccgcccctccaccgacaaccatcacccgcccgtaacccgaaaaacccgccagcgcgcggatcacgcgttgtttcagtgtttcttccttttcacgaataaccgccatcaggctggcgtaatgcgcgtcattgtggatgtgctggcgcagccaggcttcatcatggcgatgttcgataatggtattggcgatgtggtgactggtgcgcataccgttagtggccatcaccgacagtacggcatcggccatcagagaaacgcctacgtgtggatcgcaaaacacctggctgatacctgccagttgcccctgaacctttgccacatccagcgtggttccgcccaaatccacaatcagcagggattcaaacggactcatgtcagccagtgccttaaagccagccggaatggattcaggcataacccgtacgttacggatagtgaatgcttcgccgttctggtactccaccgggcgcataacgttcgcttttttgcggttgatgttggccatgtccggctgtgcgtttgtgtcgaaatactcgctcagtggcagggtgacaaccacatccacctcctgtggtgtgatgcctgatttgaccagcgcgtggtgaatggcgattacattcacatcgctgtactggtattgcgtgtcggtcgtctggacaaagcgatcgctgaccggatcaaaaccatagcgcacgccatcaagcatgtagttcgcaggctgcgagccaccgaacggcgcagaccattccgacttgaagctgttcgggctgatggcgttgcggcattcgccgttctcagtccatgccagcttgatgttggtggagccgtcgtcgatacaaattttcatgtcggttttccttatgttgattaattaatcgtttacgggattctgaaatcccgtttttgcctgttttgtgcgcgcttcatatatcgctgcgcgttttttgctcatttacgggattcgtgagtcccgtttctgtctgttttttgtttccgctggtcaggccaccccgcagcaggtctgctttgcggcgggcgcgttcagtggtttcactgattctctgtgcgtgctctgcgtcgcggatggcgcgcagcatgtcagaaagcacggtaacgggtgttttcatggtgttctggtcctgctgaagtgtggatgccaggcgtgcggcggcttcagggtctgatgcccccagctgtgccagatagctggcgaccgggttatggcggatctccgtgctgcttacgccgtgattacggctcaggcgctgccagagctgcgtgattcggctgtccgggcgggtatccggtttgcgtacaatttcaaatccctgcggtgcaatgatgctgccgtcaacgtacagactgccgccccgtaacaggtgctgcatctgttgttcaccgatatgcaggccgagagattcagcagactcccgccattctttagcgagtaattcgtggttatcaggcaaaggccgctgctgtttgcggctctgtgtccagttctgcatttcatcgctgctgttttttgcctgtttgtcacgaagcgaacgcatcagcgcccggcgttcgtgccgtttcagtgagcgcatccattcatttacttcaacgccgtcaggaagctgcggccacggtgctggccgttcttccggctgttctgtcccgttgttgcctgtttcctgtacacggggacagttattgccacgagtccaaggggcggtagggccgccctgaaggtcaaaaccattttcgcgggcgctgtcttccgcttccggtttacgtcttaccagcttccagttatccgggtgcgtgcacacgcgggaagactccccgatgagcggcgaccagatcccgtaaatctgtacactctgctcgccgtaatcgttcagctcatctgcgaggtcgtaggcggtgcgaatcaggtagtctttacgtggaacaagtacgccgccctgtttttcaatgtaggaggcaaaacacccggcatcagcggcagcgagtaccgcatccattgcatcatccttcagccgttgcgggccttccgggttgcgtgccatctggctggcaaggcggcggagttcacgccatacctgacgggaggggatgccaaagaactggaactggcggacccgatgaagacgcgcccagccaatggcgcgctccacgctctcggccattgattttccggtttcgtggtcaacgcgtggcttgcccgttttcgggtcgatgccatctacggcgcggctgtccaggttttttccgatgtaggtcgcgatatagctggttggtgtgccttttgagccgtcgacatactccgccttaaagcgcggagtaatatcatcacccagctcgtgacgatcttcctgaatggcaatatcgcgggtgtgggacacaatggtgtcgatttcttccggatgagcaaagaccatcatatgccagtgcacggtgccgtcatggtgaggctccaccgtgcggatgccataccagcgcaggccgtcgcggttcagtttcttgcggaccgccgcaaaaaacgtgttaaccaggtaatcgctggagtcgcgcatggtggccccgttccatttgggattcggatgaccgttctctgttgtggcgtggtattttgacgggcaggtgacagtcagaaacaccgctttgtcgccacgggcttcggccagaagttccagccccttcatggtggccatcatttctgccttacggtgaaccgggttacttactcccgcgtaatacactgtttcgagatcaatcgtgaacccgtcttcgttttccagcataaaacttttcaggaaatcgcgtgttttctcgcgctgtgcgcgaaactcgcttaacgcgtcctggctcagatagggtgatgtttttctggaaaccagacaggcggcgcggagttgttcttctctccactcgcaacgtaacagccacagtttgcgtttccaccattccgcacaggtcaggcgaaggattgcgcccggcagcagctccgtgtccggttcgttcctccggtctttgtctgttgtcagtgcgtcataatgtggaggcatggcgtgcaggtgtaacgccatgcgggccagcatctgatacgccttcagcgttacatccatggtcagttcgccatcagtcgcgccaaagccatcgcagagtttttcgaaggtgctgctgaacatcgccgccgtcatggtggccagcgtctgtatctggtgtttgttgagctgcggcaggtaaagcaaatcgtccaggcgttcgcgtccggcaagggagcgataacccggtgtcagccagcggctgtcggtgcggtccagacgttcgaatattttgcgcagggttccgcgtgcatagcgttccgcctgccagctctttttgcctttctgacgatcggcttcctgcttcttgcgcaggaaagagaggtggcggctcagaggttctcgcagataaacgggaagcgccttcagtgtggcaaaggcacgggccaccgggtcttgttctgttgcccggcgcttactgatgatgctctgtgccagcttttcacgctgtccggcttcctcaagggatgccatgagttttttacccatggcggattgtgcgaaaaaggcttcctccttcgcttcctgttcttcccgggcctttttgtccgcctcaaggtagtaacggatggcgcgttgcaggtcggtttcagtttcctgcctgtgctccgtaaatctggccggatcaatggctggccgtggttcattccagctccatgcaaactcactcatggctggtatcccgtcacgcgctgccactcctgcgagaagagggcagaaaggcggttaaattcagcggtgtattcactcagcgaggcacacccgccagcagtgcgatgcgccagcattgccgcaaatacggaggccggggagtcgtaatacgccagcagtgattctccgtgtggtgtcaggcagtgcaacgccagcccgtgtggtgtgaagtccacgcggtagcagtcgtctactgtgaaataaagggtgtctgcattctctggttttgtggtgcgtgctctgttgtcacgaccacggatgtagagatcaaataatccctgaagaacgggagccagacgggtgtcctgtgtgcgcacccatcttgtgaagtcatgagcgtcaatcatgctgcaattctctttactacagatgtgcgaaggcctcccgccgcaaggtgcaggaaaggcccggaacaggaattaatggagtttgttttgctactggaagagttgttgcagctcgcgcagatcatccgccagatagctgaaaacagaggcggaatagatgttcgatagcgcgtggctgcgctcatgcagcatattgatgtgcatgatttgcgcgacgcgtgatgcgcggaaaagtctacggttgatttcagtctggatgtgacgacgcgcagcgtatgcgcgctgttgtttgcggtttgccatggtgtggcctctttgctcggtgatagaaatagctcaccatccagagttgagaatctcggggtggcgagacgtacagggttctcaacaccggagagcaaagaatccggcccgaccgaagtcggccccgtacgccccgccataattctgacgcgaaaaagacgtggcaatacagtacgcacaaaaaaaccgctggcgcggttatgcgctttgctctgtatcgggttgagaatcccggcacccgttttatgaggtgcagcggaaatgtaacctgactgattgcggcatggcaagcggtttttttgtgtgtgcatgttctggtttcttactggttcagaaaaaaatcaaaaaccttgtcaatgcgttgcagcagctcttgctgtattgcttccggcgtttccggttcgcctggtgcctccaacgtcgcgcagaaatcagcgatttcatgatggagtgtcaggcgaatggcaggagccgtggttctggcgtgctccagctcatccagcaatgccagcacagcagacggcgagagcattgcgcgaaatgccagtaatttttgaggcgttgccattcgttgcagggcaaatgccagttcgcgtagcttctggtggttgatggtgctcatgctctggcttccttcagtagctggttaaacatgtgagtaagtggattgctacacccgaacggcatcgggtttacgtggtaagaagcctggcctccagttttgcgagcgcgaccacctgtgctgcggtttgttctgatgactaagccgccgcgccaaagttggcgtaactcagcattaatggctgtggttggagtattcagtgctgcggcgatctctccgccgctacaccccggatgagtagcgatgtagtccagaatggtcatctgtgtggctcctgtacctgtcggataagattcacccgcgccacgttggtggcgcagaagtaagtgccgtcagtgaggtagatgtggtgtgcatccttttccgaacgatgtttgtcgatagtggtaatcaggcgttcgtcgacctcgtattcgcgccctctggaggtaaagcgaacgacgggaaaatgcttaattgccattgcgccccctttgtccagtaaccctatgcgttaaatacggcacgttgcgcgtcatcaatgaatacagcttgagagcgttctatcaggcggagatttgtcagaagctctgactcttttgtgtggtaaggcgttatcaggtatttgccgtgcagttcggcaataatggtgtattgcgtcattattgccgaaccaagaatgtaaatgcggcgtccaatgctggacggattcatggctgcaactgttgactgtgttttaagagtgtcgatttctttgccctgttcctcaataattttggctgcgtcagcggtgatttttgcgatggtcagtgcgtgaagtgctgccatatgttggctacgcttcacggcatctttagccatttcatcttccgcttctgatattttttttaatgtgtcgataatgccttcttcttttgcgttcattttatatctccattatttacgtgtgcgaatacctccgttaatacggatggttttcacgttttcttatttaatttgatgttttatttgtatcgttattcatcagagaaaaaacgctcgatctttttcactgaattaataattcgcataatcccaatggcgcagaccaccgaaataatcagaacaagccatgagataaatatactcatgcgatattccccagcttatacggttcaatgtgttccccgcattctgcggcacagatcagctcggaaagttcgttaagtgcatccagatcatcagcgtaaaaagccacgtcatacagactccggattgccctggtcaatgagtcacgggcagcacgttcagcatgagcgcctgatgcacttaagcgaaaatagaaacgctcaagtgctttgttaatgagagttttatattctttgcccatcgcaacgccctttaatctgctttctggatttcagcttctgaatccatgcaaataatttcgatatagggttcattgccattagcctggcgcgctttttcagctttgctaatgatttctcgtacggtctggtacggaagttccacaagcagtcgcgtgccgttcagataaacgtaagtgacttcgtcggctccgtttttacccgccggagccactccatcaatagcggatgcgcgtaataacagttcaccgcgaaaatcaataaaacggataaatacaccttgtgcatggtctttggtcataaagcacctgttataaatcagcctgtttaataaaactttgtccgcgaagcagacgatcaaccgtgcgtagcgcttcgtacaatgtgaaatcctgcccgaactgattgtcgccgcagctcaatgcaaaaatgcggtttccggtaaacggattgcgtgggcatttgtggaccacgattccagctttttcaatcagccaggcatgctcgccgatttgttttactgggtagccatccggcgttgcgtgtgtatcactcaggctgtagcggatgttgctgcgtgatgcgctggtagcgaaacggttagcgtggcgttcagcaccattacgaaagcgtgaattacgttgctgtttcatatcaaaactccctgcatctcatgcagcaaaattaagaaaacctaatcccaaatcttccgccagcttcttggctttcttcagccagtgattgcgccaatctttacgctcaggaggaagctgtttcgttgcgtcatagaccatttcgagccactcattccaaaggatgagaagacggcgcgaactcccttcctcgcctaaaacctcgcgctcagtagttagagggatgagtcgacgctctaccaactttcttacggctgattcggtcttacctgtgcggcgggaaaactcatcgacggtgatggggtctgggatcttaaacaatgccctcaatagttcttcattcatgtgataatctccctgtttggggtatttcttgcgacggatgccccaaatcaaactcatttgtataaacactaatacagacgttggagaattgcaacatgcgtatgactattggagagcgcataaaaatcatgcgtgaaagcgagagacttactagcctcccggatacagcaaaaatgcttggtttaaaccgtgatgctctgtggagatatgaaagcggtaaaactatccctaatgctgaagtaattgagcaaatactaaacaaccccagatttgagaaatatgcgttgtggtttatgactggaaaaattgcgcctgaatccgggcagatagctccggctctcgcacactatgggcaagaaccaacggatttacccccatccgaaaggaaaattggttaaccctttattattcttacgttttacaaactggaaatgtctttcctcgtttcaccggagggcttgccaatggcaattaaagcactcgatggtggacggtataaagtggatgttagaccgcgtggccgaagtggacgtcggattcagcggatttttaagaaaaaggcagatgcagtggcctttgagcgttatgttctcagccacatgcacgataaggaatggcttgaaaagccaacagagcaacgtcatctctcagatctgcttccgttatggtgggaattgggtggacgcaataagccatatgctaacggcgttctaaccaggttgaaaaaaatcatcaaagaaatgaatgatccaagggttagccagattaatgctcgtttcatggccgcttatcgaagctcccgtttatctttgggagtaaaagagtctactgttcggcgtgatgagtcggatctcggaggaatgtttacactcctggcaaatgccggggaatttcacggagaaaatccgctccgcgccctcccctctttgaaacgaaaatcacccgaaatgacgtatctcaccacggaagaaattgccaaattactggatgcagtaagcggtgatgcccggcggattacgctactttgtctcagtactggtgcgagatggggagaagcgaaaaatctgcgcgcggaacacatcatcaataaccgcgtgacgtttaacaaaactaaaaacggaaaagttcgaattattcctgtctctgatgaagttgttagcgagatcaaaacaaagaaatccggccttttgtttgacgtcaattatgaggaatatcgcaaggtgcttcgcagtgttaagcctgatctaccaaaagggcaggcagtacatgttctacgccatacctttgcagctcactttatgattaatggaggaaatatacttacgctccagcgaattatggggcacgccacgatccagcaaactatgacctatgcgcacctcgctcctgatttcctccaggatgcaatttcacttaatccgttaaaaggaggcatccacatttcatccacataagtgggttttatagggtaatcagtaccccccaccaataacaaaacccactgaaaacaaagggaaaacattgaattcagtgggttttacaacgcaccttcgggcgcgttttttgttgacagcgtgaaaacagtacgggtactgtactaaagtcacttaaggaaacaaacatgaaacacataccgtttttcttcgcattcttttttaccttcccctgaatgggaggcgtttcgtcgtgtgaaacagaatgcgaagacgaacaataaggcctcccaaatcggggggccttttttattgataacaaaaaggcaacactatgacatcggaaaacccgttactggcgctgcgagagaaaatcagcgcgctggatgaaaaattattagcgttactggcagaacggcgcgaactggccgtcgaggtgggaaaagccaaactgctctcgcatcgcccggtacgtgatattgatcgtgaacgcgatttgctggaaagattaattacgctcggtaaagcgcaccatctggacgcccattacattactcgcctgttccagctcatcattgaagattccgtattaactcagcaggctttgctccaacaacatctcaataaaattaatccgcactcagcacgcatcgcttttctcggccccaaaggttcttattcccatcttgcggcgcgccagtatgctgcccgtcactttgagcaattcattgaaagtggctgcgccaaatttgccgatatttttaatcaggtggaaaccggccaggccgactatgccgtcgtaccgattgaaaataccagctccggtgccataaacgacgtttacgatctgctgcaacataccagcttgtcgattgttggcgagatgacgttaactatcgaccattgtttgttggtctccggcactactgatttatccaccatcaatacggtctacagccatccgcagccattccagcaatgcagcaaattccttaatcgttatccgcactggaagattgaatataccgaaagtacgtctgcggcaatggaaaaggttgcacaggcaaaatcaccgcatgttgctgcgttgggaagcgaagctggcggcactttgtacggtttgcaggtactggagcgtattgaagcaaatcagcgacaaaacttcacccgatttgtggtgttggcgcgtaaagccattaacgtgtctgatcaggttccggcgaaaaccacgttgttaatggcgaccgggcaacaagccggtgcgctggttgaagcgttgctggtactgcgcaaccacaatctgattatgacccgtctggaatcacgcccgattcacggtaatccatgggaagagatgttctatctggatattcaggccaatcttgaatcagcggaaatgcaaaaagcattgaaagagttaggggaaatcacccgttcaatgaaggtattgggctgttacccaagtgagaacgtagtgcctgttgatccaacctgatgaaaaggtgccggatgatgtgaatcatccggcactggattattactggcgattgtcattcgcctgacgcaataacacgcggctttcactctgaaaacgctgtgcgtaatcgccgaaccagtgctccaccttgcggaaactgtcaataaacgcctgcttatcgccctgctccagcaactcaatcgcctcgccgaaacgcttatagtaacgtttgattaacgccagattacgctctgacgacataatgatgtcggcataaagctgcggatcctgagcaaacagtcgcccgaccatcgccagctcaaggcggtaaatcggcgaagagagcgccagaagttgctcaagctgaacattttcttctgccaggtgcagcccgtaagcaaaagtagcaaagtggcgcagtgcctgaataaacgccatattctgatcgtgctcgacggcgctaatacgatgcagccgagcgccccagacctgaatttgctccagaaaccattggtatgcttccggtttacgtccatcacaccagaccacaacttgctttgccaggctaccgctgtccggaccgaacatcgggtgtagccccagcaccggaccatcatgcgccaccagcatggcctgtaatggcccatttttcactgatgccagatcgaccagaatacaatctttcggtaaaggcggtaatttgccaataacttgctcagtaacgtggattggcacactaacaatcaccattccggcatcggcaacaatatcagccgctcgatcccagtcatgttgctccagaatccgcacctgataacccgagagggtcagcatcttctcgaacaggcgtcccatctgaccgccaccgccgacgataaccaccggacgcagtgacggacaaagtgttttaaatcctttgtcgttttcactggagtaagattcacgcatcacccgacgcaaaacatcctcaatcagatctggcggtacacccagagcttccgcctctgcacgacgcgaggccaacatagatgcctcgcgctccggaacataaataggcagtccaaagcggcttttcacctcgcccacttcagcaaccagttccagacgcttcgctaataaattcagcagcgctttatcgacttcatcaatttgatcgcgtaatgcggtcaattcagcaaccataataaacctcttaagccacgcgagccgtcagctgcccgttcagatcctgatgaatttcacgcagcaaggcatcggtcatttcccagctaatgcaggcatcggttacggatacaccgtatttcatttcactgcgcggttgctcggaagactgattgccctcgtggatattactttcgatcatcagaccaataattgagcgattgccatctttgatttgagcaaccacggattctgccaccgcaggctgacggcgataatctttattggaattaccgtggctgcaatctaccatcagagacgggcgcagtcccgcctgttccatctctttttcacattgcgcaacatccgcagggctatagttcggcgctttaccaccgcgcaggatcacatggccgtccggattcccctgagtttgtagcaacgcaacctgccctgcctggttaatgccaacaaaacggtgcggctgggcggcggcgcgcatagcgttaattgctgttgccagactgccgtcggtgccgtttttaaaaccaaccggcatggaaagcccggaggccatttcacggtgagtttgcgattccgttgtacgagcaccaattgctgaccagctaaacagatcgcccaggtattgcgggctattcggatctaacgcttccgtcgccagtggcagtcccatattcaccagctcaagcagcaatttacgcgcgatctgcagcccggcttctacatcaaaagagccatccatatggggatcgttaattaaccctttccagccgacagtggtacggggtttttcaaaatagacgcgcattaccagatagaggctatcgctgacctctgcggcaagggctttaaatcgacgagcatattccagagcagtttccggatcatgaatggaacaaggaccacatactaccagcagacgaggatcgcgcccggcgataatatctgaaatgcttttacgcgagtcagcaatctgggcttcttgttgcaggctcaatggaaaagcggccttcagttgttccggagtcattaaaacctgttcgtcggtaatatgtacgttattcagcgcgtctttttgcatgatggcgatcctgtttatgctcgtttgcgatagttgatcctcagcgaggatgacgtaacgataacacataaagtaaagttttcaatccatatttcgtacatttttatttacacaggcaatttagtcgcgctttcaacccttacctctgtatagataaatttacactccctttgaaaacaatccgctatgctttgaaaaaggagaaagaaatgatgaaaaagtttatcgcccccttgttggctttactggttagcggatgtcagattgatccttatactcacgcgccaaccttgaccagcaccgactggtatgatgtcggtatggaagatgcgatatcgggcagcgccataaaagatgacgatgcatttagcgattcacaggcggatcgcggtctataccttaaaggatatgccgaaggacaaaagaaaacttgccagaccgattttacttatgcccgaggactttccggtaaaagctttcctgccagctgcaacaatgttgaaaatgccagccaactgcatgaagtatggcaaaaaggggctgatgaaaatgccagcacaatacgattaaattaattaaaaccccacaaataaattaaacataagattttactcattgtgttttatttctcacattgatgacggtcgcatgaaaaaatgatattttaatgagcattctgaaaaaatatcgatgcatttcgagcgaagatggtggggatccctgaatgcgtttttctcaccgactgttcttacttctgattctcctgctgacgggagcaccaatactcgctcaggagccttctgacgttgcgaaaaacgtgcgtatgatggtttccggtattgtcagttacacccgctggcctgcgctatcagggccaccaaagttatgtatcttttcatcttcacgttttagtaccgccctacaagagaatgccgcgacatctttgccttatctgcctgtcatcattcacactcaacaagaggcgatgatttcaggctgcaatggtttttattttggcaacgagtcaccgacattccagatggaattaaccgaacaatatccgtcaaaggcgttattattaattgccgaacaaaataccgagtgcattattggtagcgccttttgtctgatcatccacaataatgacgtcagatttgccgtaaacctggatgccttatcgcgtagcggtgtaaaggtcaacccggatgtcttaatgctcgcacggaagaaaaatgatggataacgataattctcttaataagcgccccacgtttaaaagagcattacgcaacatcagtatgaccagcatatttatcactatgatgctgatctggttgctgctttccgtgacctcggtgctgaccctgaaacagtacgcgcaaaaaaacctggcactgacagcagcaacaatgacttacagtctggaagcagctgtcgtttttgccgatggccctgcagcaactgaaacactggcagcgctgggccagcaagggcaattttcaactgcagaagtacgtgataagcagcaaaatattctggcatcctggcattacacccgtaaggatccaggcgatactttcagtaatttcataagccactggctcttccctgcccccatcattcagccgattcgtcacaatggtgaaaccattggcgaagtacgcttaaccgctcgcgacagttcaatcagccattttatctggttttcgctcgccgtactgaccggttgtattctgctggcatcaggcatcgcaattaccctcacccgccatttgcacaatggcctggtagaagcgctgaaaaatatcaccgatgtcgtacatgatgtgcgttccaaccgcaatttttcccgacgagtttcggaagaacgtatcgctgagtttcaccgcttcgctctcgacttcaacagtctgctggatgaaatggaagagtggcagcttcgtttacaggctaaaaatgcgcagcttctacgtaccgcgctacatgacccattaaccgggctggctaaccgcgcagcgtttcgtagcggcatcaacacgttgatgaacaattccgatgcccgaaaaacgtcggcgttactatttcttgatggcgataatttcaaatacatcaatgatacctggggtcatgcgacgggcgatagagtcttgattgaaatcgcaaaacggttagctgaatttggcgggctgcgacataaagcataccgcctgggcggcgatgaattcgctatggtgctctatgatgtacagtcggaatctgaagtgcagcagatatgttcagcactgacacaaatctttaatctcccgtttgatcttcataatggccatcagaccaccatgacattaagcattggttacgcgatgaccattgagcacgcctctgcggaaaaattacaagagcttgccgatcacaatatgtatcaggccaaacaccagcgtgccgaaaagctggtgagataacaaggatatatcgatatgataaagcacctggtagcacccctggttttcacctcactaatactgactggctgccagtcccctcagggaaagtttactcctgagcaagtcgccgctatgcaatcttatggatttactgaatccgccggcgactggtcgctgggcttatcagatgccattctgttcgcaaaaaatgactacaaattgctcccggaaagccagcaacagatccaaaccatggcagctaaattggcctcgacagggctaacacatgcccgtatggatggacacaccgataactatggtgaagacagttacaacgaaggcttatcattgaaacgggcgaatgtcgtggccgatgcatgggctatgggtggacaaattccacgcagcaatctcaccacacagggtttaggaaaaaaatatcccatagccagtaacaagaccgcccagggccgcgccgagaaccgccgcgtcgcagtggtgattactaccccttaaaacaccagcaaacagataaaaaagggccagccaattggccagcccttcttaacaggatgtcgcttaagcgaaatcttagttaagacgctctttgatacgagcagccttaccagtacgctcacgcaggtagtacagtttagctttacgaacagcaccacgacgtttgacagaaatgctgtcaactaccggagagtgagtctggaagacacgctcaacgccttcgccgttggaaattttacgaacagtgaatgcagagtgcagaccgcggttacgaatagcgataaccacgccctcgaatgcctgcagacgttttttggaaccttcaacaacccatactttcacttccacggtatcacccggacggaaggaaggtacgtcctgcttcatctgctcttgttcaagttgcttaataatgttgctcataatttaatctcttatcctgggtaaactgatatctcgggggcttacgccatcccatcatgtttatgttgctgttgtgcgtgttccgttttgaactccgccagcaaccttgcttgctcttcagtcagagccaggttttccagaagttcaggtcttctaagccaggtacggcccagcgactgtttcaaacgccagcgacgtatctcggcatggttgcccgacagtaacactggcggaacttccatcccttctaacacctcaggccgcgtatagtgcgggcaatccagcaatccttcagcaaaggaatcttccgttgccgaggcttcatgtcccagtactcccggaataaaccgggaaacggagtcaatcagcgtcattgctggtaactcaccaccactgagaacgtaatcgccgattgaccattcttcgtcaatttcggtttggatcacgcgctcatctataccttcgtagcgaccgcacaccagaatcaatttttgattcgttgccagttcgctgacgcccgcttgatcaagcttgcgtccctgtggtgacagataaatcacctttgcgccttcacccgccgcggcttttgctgcatgaatggcgtcccgcaagggttgcaccatcattaacatccccggtccgccgccgtaaggacgatcgtccacggtacggtgccggtcatgcgtgaagtcgcgaggactccagctctggatgctcagcaggccatttttaactgcccggccagttaccccgtaatcggtaattgcgcggaacatttcaggaaacaggctaattatgccaatccacatagcgccgtcttttaccgtttatccggtggtttaaaaaccaggatcccaatctacttcgattgaacgagtagtgagatcgactttcttgataacctgcccatcgaggaacggtacgagacgttccttgataccaaacgcatctttcaggtttgccttaatgacgagaacgtcattagatccggtttccatcatatcgacgactttaccgagatcgtagccttcagtggttactacctggcagcccatcaggtctttccagtagtagtccccctcttcaagctgaggcagctgcgatgaatccacgacaatttcacaattcgtcagcaggttcgccgcatcacgatcgtcaacgcctttcagcttgatgatcatgtcctgattgtggtgcttccagctttccagctggacttgctgccactgacccgccttctggataaaccagggctgatagtcaaaaatgctttcggcgtcttcggtggaagaaaacactctgagccacccacgaataccgtaagacgaacccatttttcccaaaacgatgggatcaacaggtgcttgcgcggtgagttgtttgctcatcatgaccaccgtgacagattaagctgctttgtttacttctttgatcagcgcagcaacgcgatcagaaatagttgcgccctggccaacccagtgagcgatgcgatccagatccaggcgagtgccttcttctttttcgctagcgattgggttgaagaaaccaacgcgctcgatgaagcgaccgttgcgtgcattacggctgtcagcgacaacaacctggtagaacggacgctttttagcgccgtgacgtgctaaacgaatagttaccataacatcctcttgtgtgaataaaacaaccggaccccatcgaggaacggagtccggtgtcatattaaaagcccgaaaattttactcatttttgcgggaattgcaatcaacagttgctaactctgctgtaaaaggccgtcggcggtgcagccagtttggtgccggagtgcgcgcagtcaccggagcgtacacgcagtacgtgaggatgacgagcacatcccggtgccaaaatggcaaacaagccaggccgattagcgaccagggaagcctgggggcatcatacccttcatgcttctcatcatcttcgccattccgcccttcttcattttcttcatcatgcgctgcatgtcgtcgaactgtttcagaagacggttaacgtcctgcacctgcataccgcaaccggcagcaatacggcgtttacgcgaacctttgatgatttctggcttagcgcgctctttcatcgtcatcgagttgatgatggcttccatacgcaccagcactttatcgtccatctgtgacttgacgttatccgggatctgccccatgcccggcagcttgcccatcagactagccatgccgcccatatttttcatctggcgcagctgctcaagaaagtcgttgagatcgaagccgtcaccttttttcagcttgctggctaatttctctgcctgcgcgcggtcaactttgctttcgatatcttcgatcagcgacagtacgtcgcccatgccgagaatacgcgacgcgatgcggtccggatggaacggctccagcgcctcagttttctcgccaacaccgaggaacttgatcggtttgccagtgatgtgacgaatagagagcgccgcaccgccgcgggcatcgccgtccactttggtcaacactacgccggtaagcggtaacgcttcattgaatgcttttgccgtattggccgcatcctgaccggtcatggcgtcaaccacaaacagggtttcaaccgggttaatcgacgcatggacttgtttgatctcgtccatcatcgcttcgtcaacgtgcagacgaccagcggtatccaccagcagcacgtcgtagaatttcagtttggcttctttcagcgccgcgttaacgatatctaccggcttctgaccaacatcagaagggaagaaatcaacgcccacctgctctgccagcgtctcaagctgtttgattgccgccgggcgataaacgtcggcagaaaccaccagcactttcttcttgtgcttctcgcgcaggaacttaccgagtttaccaacgctggttgttttaccggcaccttgcaggcccgccatcagtacgaccgcaggcggttgcgcagccaggttcagggtctggttctcttcgcccatcgccgcaaccagttcgttacggactattttgacgaactcctgccccggcgtcaggctcttattaacttcatgaccaaccgctttctcttttacgcgattgataaactcacgcactaccggcagagctacgtccgcctccagcagcgccatgcgcacttcgcgcagcgtatcttttacgttgtcttcagtgaggcgtccacggccactgatattgcgcagcgtgcgcgacaaacgatcggttaaattatcaaacattgtctctcgcctggggtggaaacggttggccgcaatcgcgacacatcatcagtattttgccgcagtataacatgaaggcgtctttgttgttatgcaacggttggagcagcgttcacctgacgctatactgcttctctttcttattgctcaaactgtcgacatcactatgcccgtttttgctctgctcgcgcttgtcgcctactccgtcagtcttgcgctgattgttcccggtctgctgcaaaaaaacggcggctggcggcgcatggctattatttctgcggtcattgcgctggtctgccacgcaatcgctctggaagcccgcatcctgcccgacggtgatagcggacaaaacctcagcctgctgaacgttggttcattggtcagtttgatgatctgtacggtaatgaccattgtggcttctcgcaatcgtggctggctgctgctacccattgtctatgcctttgcgcttatcaacctggcgctggcaaccttcatgcccaatgaatacatcacccatctggaagctacgcctgggatgctggtgcacattggcttatcgctcttttcctatgccacgctaattatcgccgccctgtacgcgctgcaactggcgtggattgattaccaactgaagaacaagaagctggcgtttaaccaggaaatgccgccattgatgagtatcgagcgtaaaatgttccacatcacgcagattggcgtggtgctgctaacgctcacgctttgcactggcctgttctacatgcacaacttatttagcatggaaaatatcgacaaggctgtgctctctatcgtggcgtggtttgtctatattgtgctgctgtggggacattatcatgaaggatggcgtggacgccgcgtcgtctggtttaacgttgcgggcgcggtaattctgacactggcctacttcggcagccgaattgtccagcagttaatcagctaaacccagaaaaggagtttcccctggaacacatttctactactacgttgatcattattctgatcatcatggtggtcatttcagcctatttttccgggtccgaaaccggaatgatgaccctcaaccgctatcgtctgcgacatatggcgaaacagggtaatcgctcggccaaacgcgtcgaaaaattgctgcgtaagccagaccgcctgataagcctggtgttaatcggcaataacctggtcaatattcttgcctccgcgctcggcactattgttgggatgcgtttgtacggcgatgcgggcgtggcaattgcgactggtgtgctgacttttgtcgtactggtatttgctgaggtattgccgaaaaccattgccgcgctgtacccggaaaaagtcgcttatccgagtagttttctgctggctccgctgcaaattttgatgatgccgctggtctggttgctgaatgctatcacccgtatgctgatgcgcatgatgggtatcaaaaccgatatcgtggttagcggctctttgagcaaagaagagttgcgcactatcgtgcacgaatcacgctcacaaatttcccgtcgcaatcaggatatgctgctgtcggtgctcgatctggaaaaaatgaccgttgatgacatcatggtgccgcgcagtgaaattatcggtattgatatcaacgatgactggaaatcgattctgcgccaactctcccactcacctcacgggcgcatcgtgctctaccgtgattcgctggacgacgccatcagtatgctgcgagtacgtgaagcctggcggttgatgtcggagaaaaaagagttcaccaaagaaaccatgctgcgcgccgcggacgagatctattttgtgccggaaggtacgccgctcagcacgcagttggtaaagtttcagcgcaacaaaaagaaagtcggcctggtcgtcaacgagtatggagacattcaggggctggtgacggttgaagatattctggaagagattgtcggcgatttcactacgtcgatgtcgccaacacttgccgaagaggtcacgccgcaaaacgacggttcggtgattatcgatggcaccgccaacgtgcgggaaatcaacaaagcctttaactggcatctaccggaagatgatgcccgcacggttaatggcgtcattcttgaggcactggaagagatccctgtcgcaggcacccgcgtgcgtattggcgagtacgatatcgatattctcgacgtacaggacaatatgattaagcaggtaaaagtttttcctgtgaaaccgctgcgcgagagtgtggcggagtaacgaaaacggcccggcattcgcatgcagggccgtgaattattacgaaagcagaaattaagcttttgctttcgctacagtaaccatcgccgcacgaatcgtacgaccattcagcgtataacccttctgcataatgcccagtacgttacctggcgcaacgtcatcagattccaccattgcgatggcctgatgcacattcgggtccagtgggacgttagtttcggcgatcacttcaacgccaaacttacgcacaacatccagcatcgacttcagcgtcagctcaatgccttcaaccatcgcagacatatccgggttagctttatcagccacttccagcgcacgatccaggctatcaatcaccggcagcaattcgttgatgaatttctccagcgcgaatttgtgggctttttcaatatccagttcagtacgacgacgcaggttttccatttcggcttttacacgcaaaatgccgtcacgttcacgggtctgggcttcagccagctgagcttcgagattcgcaattttttcatcgcgcggatccacctgctcagcagaagcttctggctcaactgcctcaatctcttcgtgctgatccatgataatttcttccggggcttgcccctcaggcgttttctgttctttactactcatgaatttctccgcgtttttttcgcattcatctcgctaacttcgcttattatggggatcagtttcagggtttcaagggaagcactcacattgtcatcaatcttcgcaacaaggacctcggaaaaatgaataatcatttcaagtgtattggcattgtgggacacccacggcaccccactgcactgacaacacatgaaatgctctaccgctggctgtgcacaaaaggttacgaggtcatcgttgagcaacaaatcgctcacgaactgcaactgaagaatgtgaaaactggcacgctcgcggagattgggcaactagctgatctcgcggtagtcgttggtggcgacggtaatatgctgggcgcggcacgcacactcgcccgttacgatattaaagttattggaatcaaccgtggcaacctgggtttcctgactgaccttgaccccgataacgcccagcaacagttagccgatgtgctggaaggccactacatcagcgagaaacgttttttgctggaagcgcaagtctgtcagcaagattgccagaaacgcatcagcaccgcgataaatgaagtggtgcttcatccaggcaaagtggcgcatatgattgagttcgaagtgtatatcgacgagatctttgcgttttctcagcgatctgatggactaattatttcgacgccaacaggctccaccgcctattccctctctgcaggcggtcctattctgaccccctctctggatgcgattaccctggtgcccatgttcccgcatacgttgtcagcacgaccactggtcataaacagcagcagcacgatccgtctgcgtttttcgcatcgccgtaacgacctggaaatcagttgcgacagccagatagcactgccgattcaggaaggtgaagatgtcctgattcgtcgctgtgattaccatctgaatctgattcatcctaaagattacagttatttcaacacattaagcaccaagctcggctggtcaaaaaaattattctaattttacgccagcctctttactgtatataaaaccagtttatactgtacacaataacagtaatggtttttcatacaggaaaacgactatgttggcacaactgaccatcagcaactttgctatcgttcgtgagcttgagattgattttcatagcggcatgaccgtaataactggcgagaccggcgcgggtaaatctattgcaatagatgccctcggtctttgtctcggtggtcgcgctgaagccgacatggtgcgtaccggcgctgctcgcgctgacctgtgcgcccgtttttctctgaaagatacgccagcggctctgcgctggctggaagaaaaccagcttgaagacgggcatgaatgtttgcttcgtcgcgtgatcagcagcgatggtcgctcccgtggtttcatcaacggtacagctgttcctctgtcacaactgcgcgaactgggtcagttgctgattcagatccatggtcagcacgctcatcaattactcaccaaacctgagcaccaaaaattcctgcttgatggctatgccaatgaaacctctctactgcaggaaatgaccgcacgttatcagttgtggcatcaaagctgccgtgacctcgcgcatcatcaacagttaagtcaggaacgcgccgcccgtgcggaactgctgcaataccaattaaaagaacttaacgaatttaatccgcagcccggagagtttgaacaaatcgacgaagagtacaaacgtctggcgaacagcggtcaattgctgaccaccagccagaatgcattggcattaatggccgacggtgaagacgcaaacctgcaaagtcagctttacacggctaaacaactggtgagcgaattgattggcatggacagcaaactgtccggcgtacttgatatgctggaagaagctaccatccagattgctgaagccagcgatgaactgcgccactactgcgatcgtctggatctcgatcccaaccgactatttgaacttgaacagcgcatctcaaaacagatttcgctggcacgtaaacatcacgtcagccctgaggcattgccacagtattaccagtcgctactggaagaacagcagcaactggacgatcaggccgactcacaagaaacgcttgcgctggcggtaacgaaacatcatcagcaggcactggaaatcgcgcgcgcattacaccaacaacgccagcaatatgcagaagaacttgcacagctgatcaccgacagtatgcatgcgctctcaatgccgcatgggcagtttacgatcgatgttaaatttgacgagcatcacctgggcgctgacggtgccgatcgtattgagtttcgggtaaccaccaacccaggtcagccaatgcagcctattgccaaagtcgcatccggtggtgaattgtcccgcatcgcactggcaatccaggtcatcacggcgcgtaaaatggaaaccccggcactgatttttgatgaagtggatgtagggattagcggtccaacagcggcagttgtcggcaaactgctgcgtcaactcggcgaatcaactcaggtgatgtgtgttacccacctgccacaagtcgcgggatgtggtcatcaacactattttgtcagcaaagaaaccgatggtgcgatgacagaaacgcatatgcaatccctgaataaaaaagcgcggttacaagagctggcgcgcctgcttggtggcagtgaagtcacacgtaatacactggcgaatgcgaaagaactgcttgcagcgtaaacttttttcctgcttcacggtcagagtaaacagcaaaacgccgtaagaccggaaagcaaaaggttttaaagtgatgaaaggtctattatcatcggcatattacagatgagccacgtactgctcgggcccgaaaaggaatcaaatcactatgcgctgtaaaacgctgactgctgcagcagcagtactattgatgttgaccgcaggctgttccactctggagcgagtggtttaccgtcctgacatcaaccaggggaactatctgaccgctaacgacgtatccaaaatacgtgttggcatgacgcaacaacaagttgcgtacgcattgggtacaccgctgatgtccgatccatttggtacgaatacctggttctatgtcttccgccagcaaccaggtcatgaaggtgtaactcagcaaacgctgacgctgacctttaacagtagcggtgtgttgaccaatattgataacaaacctgcgctgagtggtaactaataataaagttgctctcaaagacgttaaaaaaggtgctcaatgagcaccttttttctgtctgttatttattcgctgatttttctgctcgttgcctgcgaagctctttcggatcggcaatgagagggcgataaatctccacccgatcgccatcatgcacactatcgcttagttttgccggacggctgtaaatgccgactttgtttttagttaaatcgatatcggtacgcaattccagcaagccactggcgcgaatagcttcttcaaccgtcgcgccctcctgcagcgtcactcgctgcaggtactgcttctcaggtagcgcataagccacctcaacggcaattttacctggcactgtaaacctctttcgcacgaaccgtaaaagcctggaccatattagccgccagctctttaaacacgcgaccaaaggcgagttcaatcaacttattggtaaactcaaagtcgagatgaaactcgatacgacacgcctcctggctcagcggcgtaaacttccatccaccaatcaatttcttgaacggcccatccaccagattcataagaatactttggttactggtcaactggttgcgggtagtaaacgttttgctgatcccagccttagagacatctaccgccgcagtcatctgcccaggagtggactccagaatccgacttccggtacaacccggcaaaaactgaggataagactgaacgtcattcactaactgatacatttgctccgcgctgtagggtaccagtgcggtccggctaatctgaggcataacaatttccatcaacaaaaatccaacaaataatatcatttatcctgctgtaaaaaaaacgctatcccggcgctgggtaacatcgggttcatgctaagatagagccttgtcccccgcaggattgatatggggtgttttcgatttcagattaccgatgattcacgacgcttatgacgaagaaaaaagcacataaacctggttcagcgaccatcgcgcttaacaagcgcgcccgtcacgaatactttatcgaagaagagttcgaagcgggacttgccctgcaaggctgggaagttaaatccctgcgcgcaggaaaagccaatatcagcgacagctacgtccttctgcgtgacggagaggcatttctgtttggcgctaacatcacgccaatggccgtggcctccacgcatgtggtgtgcgatcctacccgtacccgcaagttacttctcaaccagcgcgaactggactcattgtacggtcgcgtcaatcgagaaggctataccgtagtggcgctctccctgtactggaaaaatgcctggtgcaaagtgaaaatcggcgtcgccaaaggtaagaaacagcacgataaacgttcagatatcaaagagcgcgaatggcaggtggataaagcacgtatcatgaaaaacgcccaccgttaaacctgcactccaattattgaccagttcctcaccgcgcctccctctccggcggcgcgaatgaacatcttattggctatcacatccgacacaaatgttgccatcccattgcttaatcgaataaaaatcaggctacatgggtgctaaatctttaacgataacgccattgaggctggtcatggcgctcataaatctggtatacttacctttacacattggggctgattctggattcgacgggatttgcgaaacccaaggtgcatgccgaggggcggttggcctcgtaaaaagccgcaaaaaatagtcgcaaacgacgaaaactacgctttagcagcttaataacctgcttagagccctctctccctagcctccgctcttaggacggggatcaagagaggtcaaacccaaaagagatcgcgtggaagccctgcctggggttgaagcgttaaaacttaatcaggctagtttgttagtggcgtgtccgtccgcagctggcaagcgaatgtaaagactgactaagcatgtagtaccgaggatgtaggaatttcggacgcgggttcaactcccgccagctccaccaatcatgattggacggtgtaaggacaacaccaacaaaaacaggaagttagcagtctcagcaggacaccgaccagacggtgaggagacaaaaaaggatacgcaaaggagccgcggctctcgagtgacacaaaagcccgcttatgcgggctttttgtttttcccttaagttcctagccgcttatctataactatggaaaaatgttaaccctgactgtatgttaacaaagggatgtatatgtcggtttttcataactggctgcttgatatcgcaagcgggaattactttatctacatcaaacgcctttctgcaaacgacacaggcgcaacaggtggccatcaggtcggactttatatcccctcaaatatcgttgaaaagctttttccatctatcaatcatactcgcgaactgaacccttcagtcttccttactgcgcatgtatcatcccatgattgccctgatacccaagcacgcgcaatttattacaacaaccgttattttggtaagacccgaaacgaaaaaagaattacgcgctgggggagaggaagtccattacagaaccctgaaaatacaggagccctcacaattcttgctttcaggttaaacgaacagaacactgactgttccgaggtagatatatgggtctgcgtcaatcccgatgaagaggatatcatcgagtctgctattggcgaaatcatacctggaaccctaatttccggccctgccggacaaattttgggcggattgtctcttcagcaaactccagtaaatcataaatatgttattcctgaagactggaagaagcgttttccttctggaaacgaaattattcaatatgctgctggccattatgctaaaaactccaaggatccagatgagcaactgattgaccgtcggcgtgtcgagtatgatatttttctactcgtcgaggaattacatgttcttgatattattaagaaaggattcgattctgtagatgagtttattgcattagccaactctgtcagtaatcgacgtaaatcaagggcaggcaaatcacttgaacttcacctagagaagctttttatcgagcacggactacggcatttctccactcaggcagttactgaaggtaataaaaaaccagatttcctgtttccttcagcagaggcatatcataacgttgaatttcctgtagaaaacttacgtatgctggcagtaaagaccacctgcaaagatcgctggcgtcagatactgaatgaagcagataaaatccatcaggtacatttatttacactgcaagaaggtgtttcttcagcacaataccgagaaatgaaagatgcgggtgtcagactcgttgtaccatcaactttacataaaaaatacccagaagcagttagagaagaattaataacgctcggagcattcattactgagctgatagagctttacgctgaactatcataggctgactcccggcttaaaaggccgggagatgttctcaaggctgcccagtcttaccagcatcagcagaaacagctttgaggatatagggttccagaagtctggcaacagcttcaaatactggcaccacaactgagttaccgaactgccgatatgactgagtatctgaaaccggaatacggaatggtttccctccaggtttttcaaatcccataaggcgtgcgcactctcggggagtcagcctgcgtggtcgacgagcctgattactctcattcataaagtcagcctctcccgttgccatatcccaaccacgatcaataagaatttctgatccgtctttgtgatatctggcagaaagtgtgcgtgcaatgctttccttattctcaggattgaccaacccaaagccaaaaccattccccttggctgcatgctttttggcgtagttataaaggtactcccatagttttggcgtaagtatatatttactgtcgactacaggctccagcaattcaccaaatgatgggcggtgttccggataaaaacgactgatatcacgcaaggtaaaccccttgtgaatattcagatctcgtctaaatccgaccagaacaatgcgttcacgatgctgaggcaaaaaatgcttcccatcgataatctttggatcgttttttcccatttctgcagcatcggcaacttcgtagcccagctcgtcaagggtctccataatgactttgaaagttttacccttatcatggctcttcagatttttgacattttccagcacaaaaattgccggtttttttgctcgtataatacgtgccacgtcaaaaaaaagtgttccttgtgcttcacattcaaaaccatgcgcacgaccaagtgagtttttcttactaacaccagcaaggctaaatggctggcacgggaaccccgcaagaagcacatcatgatccggcacatgctcatcaatatatgcataagcatccgtttccaatacatcggttttatcactcagcgtgacttcccgaatatcgagattgaatttatgcacctgttcatcgttaaaccagttggccttgtatgtacgcacagcatctttattccattcactggtaaaaacacactggcctccaatggcctcaaaacctttccgtatccctccaattccagcaaataagtcaatgaagcggaaagcatattccggatggtttgcaggtggttctggtagcatcttacgcagaagagactcttctactgaagtcaacgattttggtaaacacttgccattaatccagcggttaatggtttcacggctccactcattttttccgacttttctcagtaattcagccacatacttctgatcatagatttccagcactttctcgataagctttttatcattttcctgtcgcaacttttcttccgcctcggcttccttcagcagatgctgtgccaacacttcaaattcagacataattcctccaaggggtctaatgggtgaaactttatcactcattcaacccagaaggaaatgttttatctggatatttaaacagtgactacaacgtaatctagcactggtgatgctttgttaggcatagagaatcattctatatacgactaatgacagaaaaacagcagacaagtagtttgttcataaattaacgcatactatgtgtctacggttttcgagaccggtccaatcatcaaacgaaacataaaattagctcacattatgaggaaaagtatcttttttgtactatgtaaattcaaaggcttagcctcatttctccgatggttttctcaacactactggttgtgagcccttgcaatgatcattaatatacgtctcacaaataattcttcatagatattgcaaaatggatattactgagtttccttctggagtaattgaacaccttggctggtatgtataccgattgattgatccgagggacggaagcaccttctatgtagggaaaggcaaaggtaaccgcgtatttgcccatatgcgcggtgaagtggcagcgactgatgatgacgagttactgagcaacaagctaaagcaaattagagaaataaggttatcgggtatatcagcgccgttctggtctttctgcagacgtttctctgcattgtcataggctgattttactgcctttggcgttgccgccagcgtttcagacgtactgttggtcgcactgctgagctgtactaccccctttttcgtcgtgctcgcatcctcaagcgccacggcggatgcaatatcctctgcccgttttgccgctgtctcggcgcgcgttgccgcggattccgccgtacttttgctctgtgctgccgccgtcgcactgcctgccgcctctgttgctttcgtggatgccgtcgtggcgctgcccttcgctgctgacgcctgtctggtcgcctcatcttttgaagcagacgcagatgatgccgatgacgctgccgaactggcggacgatgcggctgccgtttttgaggattctgcacgggtttccgacgctttcgcattcgtttcggatgccttcgctgcggaagcagacctcgctgctgcgctggcctgttcagtggcttcgccagccttcgttgtggctgttgaagcagacgatgcggcactttctgccgattttccggcggcggtggcactggctgaggcctgcccggcacttgttgacgcggcactggcagataatgcagccgctgtttttgagcctgccgcagctgaggcgctctgtcccgctgccgtttcagaagacctggcgttcgtctcggacgtttttgccgccttcgcagaatttgctgccgccgttgccgaggaagctgcgctgctggcgctcgaggctgcgctcgtttctgatgatttcgctgcctcttttgaggccgccgcatcccgggctgaggtggcagcttctgacgctttcgtggtcgcggtggatgcagaagtggctgcagatttttgtgacgctgcagcattcgtttctgacgttttcgccgcaccagcactggtagccgccgcgctttttgaggactctgcagcggcaacactttttgatgcttcagtagcctttgttgatgccgttcctgcgctggaagacgctgactgagccgacgtcgcggcctgcccggctgatgtgctggctgcacgtgctgagcctgcagcatcagtcgcatgggttgccgcctcacgggctgatgtgccggcatcgctggctgacttcttcgcggctgccgtgttctgtgccaccgcggacgcgttacgcgccacctcttccaccatcagttcaaaacggcgcagtgcctccggacggacatcatcctccgtcatggcaccgagaaaatcattcagcgtacccggttgtgagtcttcatacacggtgatggtcccggcatgcgatggcgggaagccttccaccaacagaataacgctgtactgaccgtactcaacgtccatgctgtaacgcccggcttcatccggattttctgaggccagcgtgttcaccaccaccgtggtgctgttacgttttgctttcagctggattgtgcagttctgtaccggttttcctgtgccgtctttcagtacacctgaaatctttactgccatattcaccccacaaaaaagcccgcctgaaccggcgggctgtcataacactgtgttacctggctaatcagaacttataaccgacacccacgatgaaaccgtcagtgcgccagtcgccactgccggagccttcataagcaatatcaatggccacggattcggtcgggttaaactgcacgccagctccccacgccagagacgtgttgctgtggcgaccgtcatcacttccggtcagcacgtcgtgcgttttccccttgttgtcagttacgcggagataatccccggagaaagtcgacacacggctgtaagccatacccgccatcgcatacgcgctgaacaattcattcacgcgcacagacggccccaccatcacgctgaaccagcggttacgcacggaatcttcatgccagcgggtatcgctgtaacgggtaagctggcgattcttgtctcctgcatagctgaatgacgtcaccatccccagtgtgtccgtaaactcataacggtatttcacgttaatcccgttcagatcatcgctgccgggaacgttcgtcgaggcatgaagataccccgcgctcagcgtggactgatgttcagatgcccatgcaggcgcaccggatacggccagacaaatggctgcggaaaaaatggcggcataaagtttacgcataattacctctcgcttttctgcaataaaaaaggcaccatttctggtgcccttatatgggttataacaatttcaacgaatactgatgccggaagcggcttttttggtcacaatcaccgtacagtcggtgatattacctgcccgctgattgcctttatggaaaaccttaaactccagagtgacgcttcccctgccactcggcatatcaataaccgcactgtagctaccgggaatggcccctttagtttctctggatgcgattaatacaccgtttttgcgaacttcaaaaccataacccgtgtatcttgtacctcccgggttattaccacttcccggatcgctatacgctattccgttaaagataatgggcggaataataatctgacggtcaaagttatgatcatcgctgatggtgactgtaaccgtcccgtttggtgtttccgtattaccccacgtaccagcctgtttcgggaatgatttggatacagctttaacgaagtcacctctgacctgagtcgcctccagcatgcccttaatcgtacagttttcatttaccgtgacattgttgagcgtcccggcgttcgcattcacactgccactgatatccgcatttttagcggtcagctttccgtccggtgtcagggaaaatgccggtggatttccaccgctggtaatggtgggggccgtcaggcgtttcaggaacacgtcgttcatgaatatctgatcgccctgaccaacaaacatcggttttgtgttgccattcgcaggattaaccatcgcaatcctgtccgccgccagcagcacctgactctgcatgccatcaggggtgttctcaataccggcaccaatacccgcgatataaaggcgtccgtcctgcatctgctgcagcttcacagcccacatgctgttcaggttattatttgtatcaacctgaaccttctgtatctgctgaattgccgcactctggtcttccagtttcttattgacggtctgcgtgatttcattgctgacatccttaatggacgtcctgatttcagccaggtcaggcgcaagctgaccgttatcaatctgcgtccacagctcctgagccagatgggttttccctatctcgcctttgaaaaaatccagatagccggatgcatcatcactcggctgaccaacagcctccacgaatgccgatttgccaacggtgttcacactgcgaacgtaaaaataataatcatagcccggcctgatattgatactggcggctatccagtacagcgccgtgccaagatagcgcgctgtggtttcaacctgcctgatatcggtaatccgcttttccgagaaccagaactcaaactgtaccgtcgggtcataaacggcaagatgcggcgtggcggttatctgaaaatagcccggcgtcagctcaatcctcgacggtgctgccggtgcggcaatccggaacgataccgacgccggatctccctgctgcccccacgcatttaccgcccggactgtcagcctgtagttccccagcgccagttgcgtgaagcggtatgtggtttccgtcgtccgggccgtgctgaccagccgctcactgccgtcgtccgctgttacggtcagacggagcaggaagctcacgcccttcaccaccttcggtgtgtcccagcgcgccagcacctgatattccccgctgtctgcagtgacttctgcggtcaggtgctgcaccgctggcggcgtgacaccgttcaccgtgccactctgttcgccgtcaaagtgcgccccgttatccacgatggcctctttttccggcacatgctgcacggcggtgatggcatacgtaccgtcatcgttctcacggatactcacgcagcggaacaggcgctggcgcagcgtcggcagcttcagcccccacacgctgtattcggcaacgccgtcaggaacacggctcactttcaccttcacgccgtcggtgacggactggacctccacgctgaccggattgccatttccgtcaaccaggcttatcagcgtggttccggaggatggcagcatgatttcacggtcgagcgtcagtgtccgggtctggctgtttaccgcaagcacgcgcccgccgacgctgatacccgcatagtcatcatcgcagatttcaatgacatcgcccggtacatggcgaagcccttctgcgcccacgctgaagtccacagtctgcgtttccagcagctccgttttaatcagccacagcccggcgcggtgtgcctgcccccggctggtacagccaaaggcatccatcttcgtgacgttacgaccgtaacggagaatggcctgcgtgtcctccacaagctctgtcgccgtctcccagccgttattcgggtcaatccagttcacctcaacggcattatggcggtccttcagggcgctgaaactgtagcggaacggcgcgccatcatccggcatcaccacattactgcggttataggtccacaccttatccgacggtcggtcctgcacgaacgtcagcgtctgcccgttccataccggcatacagcgcatcgccgagcagaaatcactgagaacatcccacgccttacgctgtgtggtcaggtaagcgttacaggtgatgcgcgactccgtgccgccaaaaccgtccggcaccgactggtcgcaatactggccgatgacatacagcgcccatttgtccacatccgccgcaccaagacgtttccccatgccgtagcgcgggtgggtcagcatatcccacagacaccaggccatgttgttgctgtatgccggttttaacgttccgtcccagataccgctgtattgccgcgtctgtgggttatagttcgacggcacctgcagaatgcgcccgcgaagatgataattacggctcacctgctggctgccgaactgttccgagtccacctgcacgccgaccagtgccgtgttcgggtagcactgtttcacatcgatgatttcggtgtatgacgaccagagcgttttgttctgcagctggtctgtggtgctgtccggcgtcatcctgcgcatccggatattaaacgggcgcggcggcaggttacccaccaccaccgaggccagatactgcgaggtggttttgcccttaatggtgatgtctttttccgtcacccagccaccgttacgttgtatctgaaccagcaggcggacttccgacggattcctgtcaccctttgaggtggtttccaccagtgcctgcacgccgaaagtaaaacgcagtcggtcgatgtttgccgacgtgatggtgcgggtgatcggcgtgtcgtatttcacttccgtacccagcaccgtctcggagccggaggattcaaatccctccggcggagtctgctcctgctcaccagcccggaacaccaccgtgacaccggcgatgttggtattcccctcatcacgtcttttgaggcaatggttttacccagtgagctcagccagccacggaaaacatcaacagtgccgttgggatatttgatacgaaacgcgcagacttcaccggagtcgaacaactgaaccagttttttctgcccgctgtcacccggacgccaggccagcgtcgccgaagtatcaccgacggatttctgcccctgggttgtcgttttccagtctgcatcttcatcatcgagataagagtcatcttctgcatcagcggtcatttcgccaggttgcagatccttcaccatcgcaagacgcagccagtcagtgtccgataaagggttcgcaaacgcatcgcccttgccggtgtacatccagaacgtcgttcccgcacctttcgtttttgccagtggatttggtgtggtcattgccacctcctttaattcgtgtacgtgatctggtacgtgatttccgccatcgcccaggtggccatctcattatcacgttgatagttaaaaccgagagggatcagggtgtcgatgagtccggaaagtgccggtatatcattcagggccgggaaaatggtgctctccatccacatatccagctctgaatccggtgcctgtgcccggatgaagacagcaatatgcagaacagcctgccagtcatcttcatccgtcatttttccggtgtactgagcatcactcagccacaccgccacggcaggcagttcctgcgcatcaataaatgccggaagcccgtcaaaaaacgtggcgctgtctccacactgttcccgaaggcgtgccagtacggcctggcggatttgtgtatgtcggttcatcgggtcagccataacctcagttgttgtttcagtgcataccccagctgtttcggcatttccgcagcaatgatgcggtcgcgggcatcttcaaatgcctgtgtcagcggtccggaaagcgggattttcaccacatcaatggggtaacgatttttgccatcaatacgccgcatcacatgccagcgaccattcgccagttgctgaataaacgcatcccggaaaagatatttacccaccttcagcacactgccacggtactgcagttttccaccacgccgggccagtctgacccgggctgtccccagcttaatggcgggcagattgccccggttaacgcggatcctggccgtcatttttcctgacggactggctttaaacacccggacacgctgacgtaccagtttacgccgtacatttcaccagaccgcggtgatcaactggcgcgacaccggcgtcaatacgcactttcgttgtcacgccatccacactgaagccctccatctgatcaatatatggcgtatccacaccgttgagataagccacttcaatcgtatcggagcctttggacgcagccaggtagaaggtggtctggctgttatcatcaagacgaggctctgcaataacggtcgcaaaatctttcaccgggttaataataccggcgttaatgtcagcccccttgacacttgaggagcgaatgacctggttagcaacagactccatcgccgtcggtaccagtacgaacgcaggacgaatattcagatgacgctccccctctttctgaacgcgcatcaactggcgggctttatccagcgatgccacgtccattgcagcgctctccagtacgtttgcatgtttcgctttatcgaacagacttacattatctgtggagattttcgggttagacgtcagaatggcataaaccagatcggcaatagtggatttcgccgcacggcccagtttcatcgggacatcggtcagcatattcagatcatcattgataatggcctgacgggtgatactgaacagctcgccataggtcgccagtgcaatagtggcctgtttatctccggtggtgacgtatttatattccgccccttcacgcacctgacgcagagcactgaagccccccatacccacacgatgggcaattttaaaatcagacacccgttgttaacttatccatggatttcataaccccacctcgcagatgcgggtgctgtgtaatggaaataaaaaggccacctgacgtggccaccagattatttccccaccagctcgtttatctctttcactgtctggttaaaccgctctgactcaagctcaacacctaaggcccgacgccccagcgccattgctgcttttattgtggaaccggatcccataaaaaaatcagcaaccagatcaccaggtcgactactggcattgattatttgcctgagcatatccgccggtttctcacacggatgtttacccgggtagaactgaacgggtttatgcatccagacatcggtataaggcacggagactgatacggagaaatagcgccggagagatttaaactcatccagcaattcagaatatttgcgattcagtgaatcataagatgccaccagctggtggtgtggttgttccagttgttgttcctgaaacttctctgccgctatacgggaaaacagtgcctgtaacttccgatagtcagcctcattcggcaagccacgctctttctgataagaaatcagcatatccagcacctgctgctggcattgagttaacgtcgtcatgccgccatctccctgaccagtttttccgcctgctggcgaacctgcgccagaaacgcctcaccacatgcctcaagttcatcgcgcccgatgtagctgattgccggtcccttccaggtcttatcgaaaacagcaatagcaccagcgaagaaagcgcctgtcggcacctgcttctcgtctttcgggataaaccagacaggcagttcaaaaccaatacgcccgcgaataaaagcaatatgatctgcatcttccggccaccacacttcgctggtggcagctttgatcaggaaaacatagcgcccgcctttatcacgcatggcactggcatgcttcatgatgtaacgcatgccggtgatgtattgcccctcatgctgactggcgcggctgtatgggggattaccaaaggcagcacctttaagctccgcaagacgttctgaccagtcatgcgccagcgcgttgtcttccgccgtgtaatacgcggcacatttggcgttatcaccgtcagtaaaaagatccagaacaaacgggccaaacagagtgttaattccccaaaaaatgttatccggcgtgcgccactgatcgcccacttccttcagttcatgggctggtttgttccgtagttccaccagcgcctggcaatatttattactcattaagcccccacgtaattccctgacagataccactcttcacctgatgcagcccgcttgctgcttttccgtaaacactgttcacgacgcgccagaaaattgtttcgttctggctgggagtggctttcacggaatgccgccatccacaccgttgcagcacgacggtataagcccctcgactccagttcttcagcctggcgggtcaggcacaaaatcacccgggggtcgttagtgccgacatagaacttgcgcacaggtctggtttcacgaactggttgtggttccggctcctgcgctctctcagtcaggcgcgagaaatgtctgcgtgtatctccttcacaacggtgagccacacgcccactctgacgtaacttgcttgctgactgcagaacgcgctgccgtgagtaaccagcaaaagcatccgcaatgtctccggaagtacaccccggatgggcttcaatgaatttctgaacttcattcaaaagactcatgatcaccccctgaatcctgccgggatctggctgtagtccacgttgtcgtaactggctttgaagtacgggtcctcgcgtctggctgcagataccgcaggaacttcccaggattcttcgaaatgacgatccgggccatagaacgtgacagcctgtttcacaaattgtgtgccgctgttacccatcgcagatacccagcccgcgtagcgtttcacaccttccagcatggtttcggggtttaccccctcgttcaaacgggctttccaggctttgaaggctgctgattttgaattgccaccagcacgtttgggatatgccagccatgcctgctcaaactccggagagtattccggtcggtttgaacgaactcgcacagactcatcagcagatgcaccaacagctattggttcattgactgattctttgactggttcaaaagagtgactggttctgggtgaatctccttcactaccaccaggtgcaactcctgcactacctggtgaatttgctgcaccagatagtgaattatttgcactaccccctggtgaatctcctgcaccatccagatgaaggaaatagatattacttgagttacctttttcaccttttcgggtgactttttttaccagcccggactcacaaagggccgcaatatgactcatcacagaacgtttgctaatctcgcactggtcagcgatatgctgatagctgggccagcactcgccctgatcgctggcattatcagccagcttaatcagaaccagttttcgcaatggattacccactcgaattttcatcgctttaaccatcagctccatactcatgctgcacctccgagatgcttcatgttttttccggagcgaaaggcaataagcggcatactgacgcggtaattgcggcccagcggttcacaaatcaccttctgacattcacagtcaaccaggctgacacgtagaacatgccctgcaggcgtggtgtaccactgcccaactgtaggaattgatatttttttacgctgaagtaaacggtgaatattgaggatcaacggattaagcatgacgatgccctccgctgatattcaggagacagtgaatatgaagattagccttatccgccaaacgaatacgttcagcctgcaagttaagaagggtttctaccagaagttgatgcgcctgcggatctgaaagagttaccttgcgcagagcacgtagtgctgttgttacataactgagtttatgtaagtcttcatcattcagacgagtgagggctgggactgtagccatgatggcagcctccgtatgcaatggataacttccaccaccggaaacgccaatttcgctggtggtgaactgagcagggttggcgtaaccggcgcatacggaaaccggcgcacctttcggtgcccccacccagcccaccataatttgggtatagctgagttgtagcaacaaaaaagacgctaacgcgccaattgtcgccgtatgcaattccaggacgccaatcccggcacccgctttataaggtgcctgaacagtgtaacgtcccggaatgacagaatcaatgtgctggtgctgtttcacactcaacaaaatcacgcctgaatttccacaaaggactaaagcactcatgcgggtagtctttgcgaagatagataacgcgctgtgtttctggttcccaacgaataacatggacataaagccctcttccatcacgaaaccagcggttaagttcctgcacaactcgccccccacagtcaggtaaagttctctgtggttatttacagacaggtgatttggtaatctgcattcatgccgtaacaacaggtgttcagccacgctgaccaccagctgttgcgacaaacggttatttgccgttaaactgttcatgcgttagtttctccacagtcacgacacgccacggcgcccggagctgcacactcgcgggcgtcattactttctgaaacgcaaaaaattttgtagaccagtgctgcatgctcctgcagcttcgaaattgacaggtacagctcgtcgttaattgctgtcttctcatgcggttccactacaccgtcttcgattgccgaacgaatctgtttggaataactgccaatttgttcaatgacttccagcagacgctggttaatatcggcgttatccacatcctcgacatcaggaagagacacaaagacgccatttgcagactgcgccacagcgtcagcaatgaagtgagtgccaccagcacgttgcaaaatcattgcccatcccagcggaaaaatctgatcgccatcggcacgaaggcggttaaataatgcgttctctgttacatccagccagtcagcagcctcagcataaccacccggcaacgccgcgatagtttttctgaccgctttcacataccactcaggctgtttttttactttccagtgatgcttacccacggttagcctcatcgttctgtggttaaaaattgaaggtcttctgctaatctttcggatagatatccggtcttaagtcagatttcgtaattgctcctgatgtgcattgctcaagttttttagccagtacaaagctggcttttttatagccattgaaaaccagccgtaagtagccaggtgttgaaccaacttttccggccaactcgccctgctgttctttggttaaagagttccaatacgctttcatacaatatgtaccccctgtatacatattacatgattgaaatgaaccttcaagatacttgtaccttaacggtacaaaggttttaatttcgttatgaaaacagtccatgacatccggcggtctaacgccagaaaactgagagatggtgttggcgggaattcttcctttgccaccatgattgatcgcgagccaacccaaaccagcaggtttatgggggatggcgccactaaaaatatcggtgacagcatggcacggcacatcgaaaaatgcttcgacctgcctgtcggatggcttgatcaagaacaccagacaacaaacatcacaaaaaaaactgatgtttcaatcactaacaaacaaattacgttagttcctgtcatatcatgggtacaggccggagcatggaaagaagttggttattctgaggttgatttgagcacagcggaaacgtatccctgccctgtaccctgtggcgaaatgacttatatcttgcgggtgattggtgattcaatgattgatgagtaccgcccgggagacatgatttttgttgatcctgaagtgcctgcttgccacggtgacgacgttattgcattgatgcacgatacaggtgaaaccaccttcaaaaggttgatagaagacggaacacaacgttatctcaaagcattaaacccaaactggcctgagccttacattaagatcaacggtaattgctctataattggcacagtaattttctcaggaaaaccaagaagatacaaaatcaaagcctaatcaatgttatgaacctgcttcggcaggtttttttatacttgacaatgtacctttgagatacataatgtacccaaaagaaacatgaagcaggcaagattcaaacaaaatttggttgtaacacggcgtatggcacatgcgtcgttagcggtctggagacgttaaaggggacaatccactccttgctcgggcaaacaaaccaggtagccggaatgtgcaagtcaatgaggatgctgataagacgcctaaccagcgtggcgattcggtttgacgcctgggaagagaccagggtgcaacgatgagggcatttatggaaccgcgacaaagtgtggtgccgtaactggctaagtgctctctgcgttgtggtaatccgcgaaatggcgcggcggtaagtatggcggggttactctttccccgttgaggacaccgggttgtcaggttgaccatacgcctgagtgacaaccccaccacaactgccattgctttggcggtaccagttttttccttagtcctttctggcaccgccctttttacaaaacagagaagagcatcaccggacgatgggctcataacccaatccatccggcagtgactaccgtaggtgttcttctctgttttgtggagaaactaaccgccccagcgggggcatttatggaaacgtaattgactcaataatcgccggatggcgagggattcttgcaaccaaaattcaacgcggtgcagcgcatataacgtggagaacgaaatgtcatttattaaaactttttccgggaagcattttttttatgaccggataaataaagacaacatcgatattaacgatatcgcggtttcactttcaaatatctgccgctttgcaggacatctttcacacttctacagcgtcgcccaacatgcggtgctttgcagccagctggtaccgcacgaatttgcttttgaagcattaatgcatgatgcaacagaagcgtattgccaggacatccccgctccactgaaacgccttcttcctgactataaacggatggaagaaaaaatagacgccgtaatccgtgagaaatacgggttacccccggttatgagtacacccgtgaaatatgccgatctcatcatgctggcaaccgaacgccgcgatctcgggcttgatgatggctctttctggcctgtgctggaaggtatcccggcaacagagatgttcaacgtgattccactggctccaggccatgcctacgggatgtttatggaacgctttaacgaattatcggagttacgcaaatgcgcatgaatgttttcgaaatggaagggtttcttcgcgggaaatgtgtaccgcgagatctgaaagtgaacgaaacaaatgctgagtacctggtacgtaaattcgacgcgcttgaagctaaatgtgctgcactggaaagcaaaataataccagtgtcagctgaactgcctccagcaaatgaaagtgttctgttatttgatgctaacggagaaggctggctgattggctggcgtcctctctggtacacctggggacaaaaagaaaccggagaatggcagtggacatttcaggtcggggaccttgaaaacgtcaatatcactcactgggcagtaatgccgaaagcaccagagactaagaaatgagcgtgataaaaactcatacaggaattgttatcacccgagacggtgaaaagcggatgaaattacattccactgaaacgtcctgggttgccggacgttgtgaatcctacgacaaaaagactggttaccgttggggtgcacctaacatgcgtcgccgtctgctactggacagcatcaggccaataaaacaagtagcaaccagagaacaaaattaattatcaggactggaatttgatattactgcccatgtgcagcgggctaagtggagaaacatatgctgaacctcgattgtgttcctatctcaacttattgcaaagaaactggcgaaactcctgaagcaataaacaaacgtgtacagcgcggtgtttggcgtgaaggtgttcaggttttaaaggttgaaggcgttaaggagaggtggattgatcttagtgaggttgcaaaatgggccagacaaaactgctcaaactaccgcgcggcgtaacaatcaggaaacaccgccagggcgaaacgatcaatataactttcacctacaaaggtgttaaatgtcgtgagcctctttccaatctggaagtaacaccaaagaacattaaatacgccgagcgcacactcggcgaaattcataataagatcgaaaggggaacattcatttatgcggaatattttccccgttctgctcgtttgaaaatttttggtaatgctgctgcaggcaaaacggtaaaaatgtacctggacgaataccttgaaatctgcgaaacgagaaaactttcaccatctacgattggtggttataaaaaatgccgtagtgcgttagcctcactccacatttgccctgcaagtgaactaacaccagcaatcctgaaagcgtggattcaaagccagaaaacgaccttaaaaacaattcgcaaccagttatctttcctgcggtcagcacttgatgaagccgtaaccgatggggtacttcaaattaaccccgtatcgttggtaactgcttcgcgctaccaaagtgataagtcagaagcagaaagcagctacgtggttgatccgctatcaccagcagaagttgatgcattactagcagcagccggaaacaaacaatgggagaatctgttccggttcgctatacatacaggcctgcgtagttctgaattatgtgcccttcgatggcgtgatatcgactttgttggaaaaactgcccatgtccagagcgcaagtgttgtcggtgttatcaaaggaacaaagacaaaagccggtactcgtaaagttgaactgacagaagatgcaatgttggcgctgataaatcagaagccatttacattcatgaaggatgctacagtctttgaagatccaaagaccaataaaccttgggcaagtgctgatgcaattagaaaaaaagcatgggtgccaacattgcggaaagcaggtattcgttacagaaacccatatcaaaccagacatacattcgccaccagccatatcagccggggagcaaacctgttttggcttgcggttcaaatgggtcataaaggaccagagatgttatttagacattatggctcatacctcaaagaatatgatggaaatacatctttaaatagaaaaaatagatattaatttagataaaaatggcctttacaggccattattcatatcaatgtatgttgaatagaataattttcaacaccataatgagatgctaattttgataaaaaaccatcctttgaagataaaacatcatctaacatatttcgtcttactaaagagacaaaaagtgcagctgctctggcttggcaattaatagatttctctggattaaattcaatatcagtaaatccatcaaaatttaatagatggagtgctagatttttgttttgattgagcgcgctcaaatataaccaatcataaaaagcagtcctggggacaatgggccatattgtattataaaatttgaagttaactaatcccccagattcctttaatctcatatctttttttgcttctatcgagcttttatctaagatatcgacatatggtcctcccatttcaaatactttacttgcttgaaatgcagattcaactgtaaactctttcccaagtcttttcgtctttattcttagattaaatgcactaagtgctacccccagcgcatcttcggatttactagaaatttccaacaaagagctcaatccctgctcattcgctgctgtatgtaacgccctgatcgatttttgcttttgcgttttagacataccaggagcccaaggaaaatccacatccttcgtgatcgatagtaagttccctgcgtttgtagggacgaaaacaggtctaacggccataacttatcctaaataataatgcctctgagaataaagtgttctagcattaagattatcataatatctctgtattgtctgtggatataatctcttgaaatgttcagcagattctttgttagggtgaaaagttcttataatatatgagggaggaattttttcaaataccagtatttcagcttgaacatccgtcgtatactcacttggaaggtttacatctctctgaatcccaaaaacattctctgaaaacaaagcactaaatgcctcagctcctttcatcaaatcaagatttataaaacgaacgttattcgaagctgcgttggtaggataaaaagcgcaatccttagcccaaagaacagatggattgatttctaatataacccagtccccaggctttaaacatctatatttataaaacatttttgcattagggtaacttacggacaaacaaatcgcatctggatgaccatcaatcctttcttcatcattacaattatattcattatcaagttctgaacgagacataaggccattatctaaaatggaagttagattatcgctatgtgtaaaatgaaacaagctacgaatattacgttgctgaattatttcctgtattgtcataaaacatccatttacttcatgtaaatatatgttttatatataacatatacctcaagtatccacaaaggatacgcatgtgatctacttcaaataaaagctataaattacagttatttaccattaatagaacgcgggttcaactcccgccagcccaccaatcatgattggacggtgtaaggacaacaccaacaaaaacaggaagttagaagtctcagcaaaacaccgaccagacggtgaggagacataaaaggatacgcaaaggagccgcggctcctggtaacatgaaagcccacagatgtgggctttttcgttgatggtcagaacgaccagttcacaccagctaccgcgttccacggggattccacaccggcactatggctataccccaccccaagatgcccgcttaacgtactgctgaatgaggctttaatacctgcctggtatattccacgtctgcccgacaaataattgacgaaattaccgtcactattcactttcacccggttatcatcgacaaattctttgcgcacagccgccttcagccacggctcaacttccataccgttccccagacgcatgttgtaactcagcgttgcgcccagttcacgatatatactgcgggtatcgactgatttcgatttcatgccattggataaatgatattcggggttatcagcggtgaaccccgttaacgatgcatacggcgtcaggttccagttaccatcggtaaatcgcatcccggtttcaatgtgaccgcccagcccgttgctgtggtaactgccattggcggctccaccgctgctcattttacctgctacgttacttttaaaacggttcagcttcacgacaccgtccagatagaaaccactttcatgttcccaactggcatagccgcccagagaataactgcccacactgccatgtcctccgcgatcaaaaccgatatgtgaatgggaatagcccataaaagcgcctagcgtggtaattccttcaggaatatcattacggctgtcgatccccactgtcattccggtcagcgtctgctcaaacccggcacccgcatcggtggtgacattattacgggtgttatacgtcgccccccagacattattgttgtgtggactcgctttcattatgttcaaccgctcgcgaatactgtttagctcagcatcaaataccaacggtaatgttgctgccatattgagtacggctgccgtagaaggcgtaatgcgtttctccggaacgggtgtcggcgttggatcgggagtagggtctggttttggatttgggtctggctttggatcgggttttgggtctggctttggatttgggatggggtccgggttgggtttgacatcattggtcaggttccagttgctgttgccgtcacttttcaggacatactcataggtcccaagatcaacgaaaccgccggtattgcccagcgtaaacgaagcatcccctccccctgttttcaccagcgtcatcgcgtcgtcagactgtgggctgacgccggtatcctgaacaaagattttaaaattaccagtggcgttgttgttgacgaccagttgatcgccccgggagcctgcaacgttggtatgcaggtagaaattaccgctaccggaaagttcattggttgtcagcgtattgtagataccgttagttgtggcaggcgctgctgtttgtgctgacaaataaacatcaccgtcgttgagtagcaaactgtttactctatattcgcagttgctggtacctgcacaggaattattgctgttaagccagacactgccccggctggcagccgtcaggtcggcaagcgtggtatcgacgccatttcccagagtcaatgtcgcgctatcggtaatccggaccgccccttcgagtttaactggcgtaacattatcccgtggcgtcattaacgacaggcttcctgtcgcgccactgaccgatgcatccgccagcgtacctgcgtagacgattgccgtaccgccagcgacctggagatcttctgcccgggccagagcctgaaactcatcttttgaccgcccaagggtatattgcccgccagagttaacctttgtggcggagtcctgacccaggttttgcattgccccacccttgccaaccgtggagtcgcgagcttcggtacctgctaataccaataaattaccgccattttccagcaacatattggtcgctaaattgccggaaatggaaaaagtaccgtattggtgagtaccgctgatttcaataccgttagccgtgctcgtctggagagcggcaccgctgttctggacgatatctgtcgctttgccattatcgttgactgtcagcgtaccgccttcattgatctttgtttttattgcctctccgttagctgaaactgtttgtattccgccgtcgttaattgttgtctcattcgccacaccctcgacaatttgttcaccgccggtgagcgtcgtgcctgtcgcagtggcttttgttttgacgatctcccgtccgcccatattgacctgtgttttgtcagaagaggtgtctgactccacggttaacacgccgccatttgccagcaggatattgttcgccgcaccctgctcgatgctgaacgcgacgccatccgcgcgtgttcctgtgacccgcgtcgccctggtggttgcaaccaaagcgccctggctactctgctgtatccccgttgcgctgcctttctcccgcacatcgagtgtgccgccgtcattaagcaccgagttttcagccagaccgccctcattaactacctgtgaacccccattaataatggaaccttccgctgtcccgtttgccataatttgttgtaggccagagacgatatcggtattgattgccttaccataattctgaacggtttgcgtgccaccattgatgtgtgttttctctgttgacccaccatcaacaatttgttcaccactttcgatatttgcttcagtggctaaaccatataccgtttgcttgccacctttgatatttgctttatcagaagtggcactggcatatattgtttgggtgccagcactattgagtacagtgccaacatcttttccataaacatccattttgccgttggcattaataatcgtgtcaactgcgcgggaaccagtgacgactgttaatgagccagcgttttccagcactacatttttagcttctgaattcctgatgtagaaagcatcaccataactgttggttccttcgataagtgttccggaggtcgtggaagcaattaatgcgccgccggattgttgctcaacatgcttagcctcaccaccgtcctgaacctccagaacgccgccattattaagtctggtgctatctgttttagcctccttctggacaatcagcttaccgccagtatcaatggtagtatttttcaccgaggttttagccactaccgtcagttcgccggtattttccagcacaacataattagcctcccctccggtaatagtgaagtgagagagcttgttgtatccttcgatatcagtccctgcacccgtgttggcaactaaagcactgcccgtctcctggttaaccccatgtgcaataccgccggtatagacaatcagcgagcctccggcgctaatattgctgccaattgccgtaccatctttctcaacaacctgccggctcccggaggatataattgttgtgtcagctttcccgccgcttttgatattttgcgttccgctgttgatattggtgcctgtggctatgccataattattaatattctgtgtgccaccattaattatggtatttgtcgcgtttcctgcaacatccataaccccgccattatctattcgggtcgcatcagctttagcattggttaaaactgacattgttcctttatctttaataatcgtcttgtttgccgaaccatatgcgtttatgtctaaatgaccaccgttttccagcaacacattgtctgccacgtgattgtggatggagaatgcaccttcactattcgtaccgctcaccgtcgtaccgttagtgttagtttttaaaattgcaccatcgtgctgggtaacatttgttgccgtaccaccactaacatcaagcacgccaccagaataaacttcaataacatccgaggtgctggtgttatcaacaatttgcgtgccaccagaatagatatgcgtattttttgccgttgacttactattcagagactgagttccgccttcaatcgtcgtgtccagcgcacggctctcatatactctttgctcaccgccatttttaatggttgttgtttctactgtgctctgttcaacatactgtcgaccaccatttatggttgtgttcgttgccagacttccttgtactacgtcctgagagccagacttatttatcgttgtaccatcagcatgcccttgaacttttactatctggctaccaccatcaatgagtattccattcgcactccctccctctacgcgtgaagcaccgcccttaattgtcgttccattgctgataccccctttataaacgtcctgattgccactctcgattgtcgtacctgtggaaatacccccgtcatgaattgactgtctgccaccgttaatggttgtattattagcctgccccacaaaattgttatgacttcctatatcttgatatccaccagattcaataagacttccattagataccccgccatgaacattctgctggccatggttgataatatgagtgttatttgttgtacctcgttcatccactttttggttgccatctacagtctcatcgtttaccacaccaataacattagtagtgaaggcagccatcccgggcggggcatatatcaaggcagatatcaataaggaaagtactgagcggcgacaataatagggactggtcctgttcataaatttcatcctctgaaaagtgaatactgagtagcgtttaagcgaccttagctttgctgcaacatcagcccacaggcaccagaccaggggattcatcctgaagagacagcgcaagtgtattgtgttcaccgctcatcaaagacatcatgatgaaatgatgatattccgcataagaatgaggcattttttaaacgcagtgcgctgaagtgtggttggataaaaaagtcaatccattcaggaaatacgggcgtattcttttctttcgacaatgaggccgttggcaaaataaaatgatttacataatcgtttctgatgaatatcttctgctcacataaaaatcacacaataactttgagatcgcagattgttttacttttacagcattcgtccccccattgttgggcaaatatagattgggccagagcacgaaagttaataccacgttcgcacagctcctccaacagcacgacaagatgccacatactgcgccccagtcggttcagtttacagactagcagtgcgttccctgccgatgatgtcctgaccagttttttcagtccggacctcctgccacggttttacgttgaagtggtaaccctgagcacgcagttcttcagtcaggcgtggtgcaccgtaacgctgttattgctgggtaagatcaaaaaactttcaggcagctaaggaaagttgaaccagacattagatgaaatatttcaaccaattacagcaccaattcagtcactgccagcccaccaaataaatcaaggggttacatgaaaacgtagcccctttttctttggtagtgacactaaaatggatgtagtgtgaagaataatcccgtttactcaatcaataatacatattgtttcaatctacgttattatctctttgtaaaaattgccatttattaatcattgaaaactgcttttagaacttgatacaacgggactagtcacaacaggactattctcaacgggatcatcctcagaggaactatcatcaaagtcatcatccataaataaaatatcatcgaatggtgccacgcccgtgatgagttttattttattattacgatcagtcaatactccacttaaaccgttttcgctcacaggttttaatgatttttcattactcttgttgtaagcaggcgcattaaaaatacacggagtatcaacatcaaacaatgacgttccccagttcacatattgaatatcatagttactgaagttctgtccagaaaagaagcaccccttaaaatccaatccacgtaaattatataaaccaccctcttctttttggagagtaatgttaattttggctatctcccggacatcatcgccatttttgtatttgaataccgtttcaagatgttctccagaaagcttgacttcaggaaataatttgaaatcaaagcctatattattatgtgtcaacgtagatgaacaaaaaatggaaaaagcttgcagtgctgaattatagctatcgattttatcttgaggctgagctcttggtaaaaacttatagcaacactcataaaaattaaacagaagctctgaagaccttgtatttttatcaaataatacccccttgaactcattcacaaacgcatcttttttttcttgaatatctatggggtgttcctttgactctgacaaagatgaaatctcatctattttgttttcatatgaattacgtgattccatacagacatttggcggcgtttctaaaataacactacgcgtactacttggcttaagtaaaccaacatgaaaatcactttttcttatattatcgaaaaggttctattcatttcttttagcgcattcaaaaaactgatcggcattatttttattcgataattttttagtttcagaaaacacattttcattgttttccagctttagtttaatgagaagattttcccagacctgcttgcttaaacatattacgtcaggctcaccagaactaactaactcgtgattattattaaagtgtacgttgaatacctttaagttattttcaccaacttcatatttaatacgttttaattgttctccagctcccataatgacaaaggcgttgccttcttgatatatacattcagacatcattttttgtaaagtttcaagagcaccgcgatacgtctctgatgcagcttccttacaaattaattttaaaatactatgagctagtagctccatgtgtttagaagatttattttcattataacttccactacccaaaactgcgctagcgttaaatccgttgcttttactaactaacattgtctattcctcaattaatgtctacatggctatttttaatgttattactgtttgtcactataaaaaaacgctcatttgagacaattactgacattaactgcttcacttgctacgcatggaacttttaattaaattagcacaggaatgttaaatttaataaacaaaaggttatttcgctgtatgataaaaaaaaccgttataatttattagtgaaaatcgtttttcaagtgttagaaatttatatctcaatagcgttggttaatgagcatagccacgctcctgtaacgctcacaaaactcatctgcctgcggcgggtgttctggtcagtagtagatgtttaaggcgtggcagagacatttcatccttactctacggcattgttctacatacattggttgtggtactcacttatcatcagtgagcgaacagagaatagttcagtgatttgagtaattaacctgattaaatgaaggggtataataaatgataatactctggctttatcgttaattacttaattccacatgtaagcaatttgcccgcttggcatagcaggcattttttccaggtacttttgaatgagtactgatggataaatacattgcagtggcgtgccacgtaccaaaacaccagccctcattcgaaaccacccaccgcacttcttccttgaaatggcgttagtcatgaaatatagaccgccatcgagtaccccttgtacccttaactcttcctgatacgtaaataatgatttggtggcccttgctggacttgaaccagcgaccaagcgattatgagtcgcctgctctaaccactgagctaaagggccttgagtgtgcaataacaatacttataaaccacgcaataaacatgatgatcatatgatgtaaataacagatttttatgcgttcccattcaccttgggtcgtgattacacgcgacataaaacccgacaccgcctccattcgcaaagtcgatactcgcagtcaacaagcaaatgttaataattagcactatctatagttatcatcgattcaatgatactttgtaatgattttgtatctaataatataactttattacattagctgaagagttttcgcatcattatgatatctgttacttttcactccataaaaataaacttcgtatagcaatatattctttcatagatcttattctgctaatcattagtttcgtatgagcgatttttgacagttgcctctccagaccacatcgataattaataaaacagatttaagcattatccttttccatataaatattggataaaagtaggacatctgtttgcaattactttcacaacaattaaacatttttatgtttccgtatacatcatattactctaccattagaggaactttattatgttttctataaaaccaggacccagaaatttacctatcgacaaccccacattgttatcatggaacattactgacggggatctaaattccaaattaaatacattagaatatctaaactgtataacaaatattattaattcttgtggagtttaccctcaaggattaaaagacagagaaattatatcaacttttcacgcagaaaaagttattaatgatctgttaaaaaacgattataaaatttccctttctccagatacaacttaccgagagttgaataaagcagcacagcgtagcattacagcgccagacaggataggagaaagaaaaacataggtttatcaacgagatacaatgattgaaagaggtgataacagcggtgtttatcagtatggtcgtgctgaacatttcacccacattatatctgacaaaccttccccaaaagataaatatgttgcatatgctattaacattcctgactatgagctggcagccgatgtatataatattaacgtgacgtcaccttccggacagcaagaaacatttaaaatattaatcaatctagaacatctacggcaaacacttgagcgtaaatctcttactgctgttcagaaatcacaatgtgaaatcatcacccccaaaaaacctggcgaagcgattcttcatgcttttaatgccacctaccagcagatcagagaaaatatgtctgaatttgcacgttgccattatgggtatatacaaatccctccagtgacaactttccgcgccgacggaccagaaactcccgaagaagaaaagggttactggtttcatgcttatcaacccgaagatctttgtaccatccataatccaatgggagatttgcaggattttattgcattggttaaagatgctaaaaaatttggtatcgatatcattcctgattatacctttaactttatgggaattgggggtagtggtaaaaatgacctggattatccctctgctgatatacgagcgaagatcagtaaagatatagaaggtggtatccctggctattagcaaggtcaggttttgattccattcattaaagatccagtaacaaaagaacgtaaacaaatccatccagaagatatacatctcactgcaaaagacttcgaagcaagtaaagataacatctctaaggatgaatgggaaaacctccatgcattaaaagaaaagcgtttaaatggaatgcctaaaacaacacccaaaagtgaccaggttattatgttgcaaaatcaatacgttcgtgaaatgcgaaaatatggcgtacgaggtttacgttatgatgcggcaaaacactcaaaacatgaacaaatagaaagatcaataaccccaccgcttaaaaattataatgagcggttacacaatactaacttatttaacccaaaatatcataaaaaagccgttatgaattacatggaatatctggtaacttgtcagttggatgaacaacaaatgtcatcactgctttatgaaagagatgatttaagcgccattgatttttcattgctcatgaaaacgataaaagccttttcatttggtggagatcttcaaacccttgcatcaaaaccgggttccacaatctcaagtatcccatcagaaagacggatattgattaacattaaccacgattttcctaacaatggtaatcttttcaatgactttctatttaaccatcaacaagatgaacaattagcaatggcatatatagccgctctgccgttcagcaggcctttagtttactgggatggccaagtattaaaatcaacgactgaaattaaaaattatgatgggtccacgcgtgtcggcggtgaggcgtagcttaataaaggttgctctacctatcagcagctctacaatgaattccacgcattatatatagataaagcaggaatatggagcgcatttgagggtgtatctgcaactaaaaacgttctggcctttagtcgtggggattctgtgaacattaatcactctcctcatgatggactagttataataaataaaggaaacgaagaagttgaaggtacctggcctaacaaattgcaacctggaatatacaaaaacatggggagtaatagcgttaacattattattaataatacccgaaaaattatcccccctggtaaagtatttacgcttagaggcggaactctaaatatcaatattcctgggcgtagcgctcttcttttagggaaaacaggagaaccgccgaactatctctatttataatttaatgttatatctgccccgataaaacggggcagataatatgtttagtttactaacggtcattttgcagtgaagccatttactgttttttatcgaccagataatctgttctctaatgttaactccccctaacctgttgctttagttattcatttcctgtctcactttgccttaataccctacgttaaatgttactaatttgttgcttttgatcacaataagaaaacaatatgtcgcttttgtgcgcatttttcagaaatgtagatatttttagattatggctacgaaatgagcatcgccatgtcaccctacatctcataagaggatcgcttctgatgaatgcactgaccgccgtacaaaataacgctgtcgattcaggccaggactatagcggattcaccctcaccccgtcggcgcaatccccgcgtctgctggaactcaccttcaccgaacagacgaccaaacagtttcttgagcaggttgccgagtggcccgtgcaggcgctggagtacaaatcgtttctgcgttttcgggtagccaaaattcttgacgatctatgtgcgaaccagctgcaaccattgctgttgaagacgttgctaaaccgcgctgaaggtgcgttgttgatcaatgcggtgggtgtcgatgatgtgaagcaagcggatgagatggtgaagctggcgacggcggtggcgcatctgattggccgttccaatttcgatgcgatgagcggtcagtattacgcgcgttttgtagtgaaaaatgtcgataactcagacagctatctgcgccagccgcaccgcgtgatggagctacacaacgacggcacgtatgtcgaagagataaccgattacgtgctgatgatgaaaatcgacgagcaaaacatgcagggcggaaattcgctgctgctgcatctcgatgactgggaacatctcgacaactatttccgccacccgctggcgcgtcgcccgatgcgctttgccgcgccgccgagtaaaaacgtcagcaaagatgtttttcatccggtgttcgacgtcgatcaacagggtcgcccggtgatgcgctatatcgaccagttcgtccagccgaaagacttcgaagaaggcgtgtggttgagcgagctttccgacgccattgaaaccagcaaaggcattctttctgtgcccgttcccgttggcaaattcctgttgattaacaacctgttctggctgcacggtcgcgaccgctttactccgcacccggatctgcgccgtgaactgatgcgccagcgtggctatttcgcttacgcctctaaccactaccagacgcatcagtaagcgcaaaggaattgagcggatgtatgattttgtgattattggcggcggcatcatcggcatgtcgaccgccatgcaactgattgatgtctatccggacgcccgcattgcgttgctggaaaaagagtccggcccggcctgtcaccagacgggccacaacagcggcgtgatccatgccggggtctattacacgcccggcagcctgaaggcgcagttttgcctggcgggaaaccgcgccaccaaagccttttgcgatcaaaacggcattcgctacgacaactgcggcaagatgctggttgccacgtccgatctcgaaatggaacggatgcgcgccttatgggaacgcacagcggcgaacggtatcgagcgcgaatggcttaacgccgacgaactgcgcgagcgcgaaccgaatatcaccgggctcggcggcatttttgtgccgtccagcggcattgtcagctaccgcgacgtgacggcggcgatggcaaaaatcttccagtccagaggcggtgaaattatctataacgccgaagtcagcgggcttaatgagcataaaaacggcgtggtgatacgtacccgtcagggcggcgaatatgaagcatcaacgctgattagctgttccgggctgatggctgaccggctggtgaaaatgctcggactcgaaccgggctttatcatctgcccgttccgtggcgagtatttccgccttgcgccggagcataaccagattgttaaccacctgatttaccccattcccgacccggcaatgccgtttttgggcgttcatctcacccgcatgatcgacggcagcgtgaccgtcgggccaaacgcggtgctggctttcaaacgcgaaggctatcgcaagcgcgacttctcatttagcgacacgctggagattttgggctcgtcggggattcgccgggtgctgcaaaaccatctacgctcaggactgggcgagatgaaaaactcgctgtgcaaaagcggctatctgcggctggtgcaaaagtattgtccccggctttcgttaagcgatctccagccctggcccgccggtgtgcgggcgcaggcggtatcgccggacggcaagctgattgacgattttctgtttgtcaccaccccgcgcacgatccacacctgcaatgcgccctccccggcagcgacatcagcaattcctattggtgcgcatattgtcagcaaggtacaaacgctgttggcaagccagagtaaccccggacgcacgctgcgagcggcacgtagtgtggatgccttacacgccgcatttaatcaataacctttgaaaacaggatgtagcgatgaaacttaacgacagtaacttattccgccagcaggcgttgattaacggggaatggctggacgccaacaatggtgaagccatcgacgtcaccaatccggcgaacggcgacaagctgggtagcgtgccgaaaatgggcgcggatgaaacccgcgccgctatcgacgccgccaaccgcgccctgcccgcctggcgcgcgctcaccgccaaagaacgcgccaccattctgcgcaactggttcaatttgatgatggagcatcaggacgatttagcgcgcctgatgaccctcgaacagggtaaaccactggccgaagcgaaaggcgaaatcagctacgccgcctcctttattgagtggtttgccgaagaaggcaaacgcatttatggcgacaccattcctggtcatcaggccgataaacgcctgattgttatcaagcagccgattggcgtcaccgcggctatcacgccgtggaacttcccggcggcgatgattacccgcaaagccggtccggcgctggcagcaggctgcaccatggtgctgaagcccgccagtcagacgccgttctctgcgctggcgctggcggagctggcgatccgcgcgggcgttccggctggggtatttaacgtggtcaccggttcggcgggcgcggtcggtaacgaactgaccagtaacccgctggtgcgcaaactgtcgtttaccggttcgaccgaaattggccgccagttaatggaacagtgcgcgaaagacatcaagaaagtgtcgctggagctgggcggtaacgcgccgtttatcgtctttgacgatgccgacctcgacaaagccgtggaaggcgcgctggcctcgaaattccgcaacgccgggcaaacctgcgtctgcgccaaccgcctgtatgtgcaggacggcgtgtatgaccgttttgccgaaaaattgcagcaggcagtgagcaaactgcacatcggcgacgggctggataacggcgtcaccatcgggccgctgatcgatgaaaaagcggtagcaaaagtggaagagcatattgccgatgcgctggagaaaggcgcgcgcgtggtttgcggcggtaaagcgcacgaacgcggcggcaacttcttccagccgaccattctggtggacgttccggccaacgccaaagtgtcgaaagaagagacgttcggccccctcgccccgctgttccgctttaaagatgaagctgatgtgattgcgcaagccaatgacaccgagtttggccttgccgcctatttctacgcccgtgatttaagccgcgtcttccgcgtgggcgaagcgctggagtacggcatcgtcggcatcaataccggcattatttccaatgaagtggccccgttcggcggcatcaaagcctcgggtctgggtcgtgaaggttcgaagtatggcatcgaagattacttagaaatcaaatatatgtgcatcggtctttaactggagaatgcgaatgaacagcaataaagagttaatgcagcgccgcagtcaggcgattccccgtggcgttgggcaaattcacccgattttcgctgaccgcgcggaaaactgccgggtgtgggacgttgaaggccgtgagtatcttgatttcgcgggcgggattgcggtgctcaataccgggcacctgcatccgaaggtggtggccgcggtggaagcgcagttgaaaaaactgtcgcacacctgcttccaggtgctggcttacgagccgtatctggagctgtgcgagattatgaatcagaaggtgccgggcgatttcgccaagaaaacgctgctggttacgaccggttccgaagcggtggaaaacgcggtaaaaatcgcccgcgccgccaccaaacgtagcggcaccatcgcttttagcggcgcgtatcacgggcgcacgcattacacgctggcgctgaccggcaaggtgaatccgtactctgcgggcatggggctgatgccgggtcatgtttatcgcgcgctttatccttgcccgctgcacggcataagcgaggatgacgctatcgccagcatccaccggatcttcaaaaatgatgccgcgccggaagatatcgccgccatcgtgattgagccggttcagggcgaaggcggtttctacgcctcgtcgccagcctttatgcagcgtttacgcgctctgtgtgacgagcacgggatcatgctgattgccgatgaagtgcagagcggcgcggggcgtaccggcacgctgtttgcgatggagcagatgggcgttgcgccggatcttaccacctttgcgaaatcgatcgcgggcggcttcccgctggcgggcgtcaccgggcgcgcggaagtaatggatgccgtcgctccaggcggtctgggcggcacctatgcgggtaacccgattgcctgcgtggctgcgctggaagtgttgaaggtgtttgagcaggaaaatctgctgcaaaaagccaacgatctggggcagaagttgaaagacggattgctggcgatagccgaaaaacacccggagatcggcgacgtacgcgggctgggggcgatgatcgccattgagctgtttgaagacggcgatcacaacaagccggacgccaaactcaccgccgagatcgtggctcgcgcccgcgataaaggcctgattcttctctcctgcggcccgtattacaacgtgctgcgcatccttgtaccgctcaccattgaagacgctcagatccgtcagggtctggagatcatcagccagtgttttgatgaggcgaagcagtagcgccgctcctatgccggaggcgacgctgcgcgtcttgtccggcctacggggatccaggtcggataaggcgtttacgccgcatccgacaatctgtacgtgaacaggaagaaatctatgttggccgggtaaggcggagccgctctccggcaaaaagaatcaataacaattatacgcgtgacccggcgcgggaaatgtcggggcgctctcccaagtgacacactttcgagaggattcaggatggggcaatcatcgcaaccacatgagttaggcggcgggctgaagtcacgccacgtcaccatgttgtctattgccggtgttatcggcgcaagtctgtttgtcggttccagcgtcgccatcgccgaagcgggcccggcggtattactggcctatctgttcgccgggctactggtggttatgattatgcggatgttggcggaaatggcggttgccacgcccgataccggttcgttttccacctatgccgataaagccattggtcgctgggcgggctataccatcggctggttgtactggtggttttgggtactggttatcccgctggaagccaacatcgccgccatgatcctgcactcatgggttccaggcattcccatctggttattttccctcgtcattaccctcgccttaactggcagtaacttattaagcgttaaaaactacggcgaatttgagttctggctggcgctgtgcaaagtcatcgctatcctggcctttattttccttggtgcagtcgcaattagcggtttttacccgtatgccgaagtgagcgggatctcaagattgtgggatagcggcggctttatgcccaacggtttcggtgcggtattaagcgcgatgttgatcaccatgttctcgtttatgggcgcagaaattgtcaccattgccgccgcggaatccgacacgccggaaaaacatattgtccgcgccaccaactcggttatctggcgtatttctatcttctatttatgttctatttttgtcgtcgtggcattaattccgtggaatatgcccggactaaaagccgtcggttcttatcgctcggtactggaattgctcaatattccccatgcgaaattaatcatggactgcgtgatattactttccgtaaccagttgcctgaactcggcgctgtataccgcgtcaaggatgctctactccttaagtcgtcgcggtgatgctcccgcggtaatgggtaaaatcaaccgcagtaaaaccccgtacgtggcggtgttactctccaccggcgcggcattcttaacggtggtggtgaactattacgcgcctgcgaaggtatttaaatttctgatcgacagctccggcgctatcgccctgctggtttatttagtcatcgccgtttcacagttgcggatgcgcaaaattctgcgagcagaaggaagcgaaattcgcttgcgaatgtggctttatccgtggctcacctggctagtcatcggctttattacctttgtgttggtagtgatgctattccgtccggcgcaacagttagaagtgatctccaccggcttattagcgatagggattatctgtaccgtgccaattatggctcgctggaaaaagctggtattgtggcaaaaaacacccgttcataatacgcgctgatcatgatcaggagtcacaccatgaccattacgtctctggatggctatcgctggctgaagaacgatattattcgcggtaattttcaaccggatgaaaaattacgaatgagtttgctgacatcgcgttatgcacttggcgttgggccgttacgggaagctctttcgcaactggtggcggaacggctggtcacggtggtgaatcaaaaagggtatcgggtggcgtctatgtcagagcaggagctgctcgatattttcgacgcccgcgccaatatggaagcgatgttagtgagtctggcgattgcccgcggtggcgatgagtgggaggcagacgttctcgcaaaagcgcatctgctgagtaagcttgaggcctgtgacgccagcgagaaaatgcttgatgagtgggatctgcgtcatcaggcgtttcatacggcaattgtggcgggctgtggttctcactatttgctgcaaatgcgtgaacggttgtttgatctggcggcgcgttatcgatttatctggctgcggcgaacggtgctttcggtggaaatgctggaggataaacacgatcagcaccagaccctgactgcggcggtactggcgcgagataccgcgcgcgccagtgagttaatgcgccagcatttactgacgccaattcccattatccagcaggcgatggctggcaattaactactcttccggaatacgcaacacttgccccggataaattttatccgggctttttagcatcggtttattcgcttcgaagattttattgtacagattagcgttaccgtagacctgtttggaaatggcactcagagtgtcgccagacttaacggtataaaactggctggcagtggctggtgtcgccgttttcacctgatcatcgacactggcaataccggaaatattccccaccgcaacaaggattttctccttcgcctcctgactcaggccgtcaccagtgaccgtcgctttgccgtcggcaatttgaatattcactttatcggcatccggtataccggttttgttcagatgctcctgcaccttcttcgcctgatcgtctttatcgtgctgacctgtaaccgcgtcccagagtttttctccggcatctttcacaaaattgaacagacccatagctacctcattcgttaacggaaacactcagaaagtgtagcagaggaacgcggcgcgttaacgccgcggggatgagcacaggtttaatcgcgggtttgcacccagaacgcgtgaatcaaaccggggatatacccaagcagtgtcaacagaatattaataatgaacgcccaaccgaaccctttaccgagcagcacgccgagcggcggcagaatgatggtgatgacgattctccagaaacccatatgtactccctataagaaaattactcattgtttaaaaagagattttatctcttaagcgtagtaattttagcggagcctgccagtttcagcttacgcttttactctcatttacgctgctgaggctggtatatgttgcatttttagtttagagtttacttaatttagaaaatacttaaataaatatgactgaactcgcgcaattacaggccagtgccgaacaggcagcggccttattgaaagcaatgagccaccctaaacgattgctgattctgtgcatgcttagcggttcccccggcaccagcgcgggagagctgacgcgcattaccggactgagtgcctctgcgacatcacagcatctcgctcgtatgcgggacgaagggcttatcgacagccaacgggatgcccaacgcattctatattccattaaaaatgaggcggtaaatgccattatcgccaccctgaaaaatgtttattgtccgtaaggagtcactatggctttgacaaccatttcgccgcatgatgcacaagaattaatcgcacgcggcgcaaagttaatcgatattcgtgatgctgatgaatatcttcgtgaacatattcctgaagcagatctggctccattatccgtgctggaacagtcaggtcttccggctaaattacgtcacgagcaaattatattccactgccaggcaggtaaacgcaccagtaataatgccgataaattagcagcgattgccgcccccgcagaaatctttttactcgaagatgggattgatggctggaaaaaagcaggattgccagtagcggtaaataaatctcaacccttgccgttaatgcgccaggtgcagatcgctgcgggtggtttaatattaatcggcgttgtactgggttataccgtaaatagcggtttcttcttattaagtggctttgttggtgccgggttactgtttgcaggaatcagcggtttttgtggaatggcaaggttgttagataagatgccgtggaaccaacgagcttgagaagcgacgccggacgcgccctagcagcgacatccggcctcagtaattagatcaggaaatcgtcgagagatttaccttctgccagcgcctgagcaattggcttcggtgtacggccctgaccggtccaggttttagtttcaccgttaacatcggtgaatttatatttcgccggacgcggctggcgttttttaccagcgcgtggtgcagcagcagagctattacccaataactcttccgggttaattccgtcagctttcatcagctccagccaggtgctaattttttcctggcgctctgccagttcacgctgctgctgttcttcttcttcacgtctttctttagtgacaaccctgaatttttcgagcatttcttcaagaacgtcaatggagaattcgcgagccatcgcacggagggtgcgaatgttatttaaactttgtaacattacggacataataaagaaaaccttttaacgccaaaacaaaaaaagtatttcgtcgcgtagtgtaagcgatcacttattatatttccacaaaatttaatctatttacagtcctgcgcgagattatttcagctgttattttctgaaactctcagaataatttcaagattatatattagccattttgatgagtaatttagattattggtgaacagagcggcgctctctgctcgctaattccgcaagcctgacaaaatcaaagtgaataaaaatgcaatataacagaataaaagaaaacatccatcactggtgctttctgctgttaatgtacattgtctggcataaaaaatgctgaaaatgacccagctactacatacaccgaattctctacgcttatagcgttacctcacccccaaactttcattagtgatattaaaggtaaggccatatctaattgatttaattaaaaataaatcatatcggcatgtaaaaatccacaatgtacaaaaaacgagccgttacggaatattttatctacaaaaactgactaaataaaaatttttcactaattgattagtcatagccagcgatatacgctatgcgaaaatgcagatggcaatgagatccactgctttcatctccattaacatcccattacgcttttattaaggagcattagcatgttctcaccgcagtcacgcttgcgtcatgcagttgcagatacgttcgcgatggttgtttactgttctgtcgtgaacatgtgtattgaagttttcctctccggaatgagcttcgaacagtctttttattccagattggtagcgattccggtgaacatcttaattgcatggccatacggtatgtaccgtgatctgtttatgcgcgcggcacgcaaagttagcccgtcgggctggataaaaaatctggcggatatcctggcttatgtgacgttccagtcaccggtgtatgtggcgatcttgttagtggtgggcgcagactggcatcagattatggcggcggtcagttcaaacatcgttgtttcgatgttgatgggggcggtttatggctacttcctcgattattgccgccgactgtttaaagtcagccgttaccagcaggtaaaagcctgactcttcttttcgcgactggcatcgccagccgcgtctttaactggcttcgccaaataaaccattcaaataacgttcaagcgcaacacgcgaactaaagccatgcgggataccgtaatgctcgtgtcgctcgcctgctaaatagagcggaaattgctggtaatgatcgcaagttttaatatcggaagcgggttcagccagtgtcgaactgcgttcttttaatgttggatgaattaccagagcggtacgtcccattcgcgcttcgcgattaacatagacataattttccccacggcggtaaccatacgctttctgggttaccacatcgacagtaaaaccgactttttcaagtacgcgcgccacctcgtctggtcgtaaatacatatttgatcctcgttattatcaaccgcgggcctaccttacctgattgcgcattcacaacgctttcagaaaagtccataaagccgcgatgaacctcagttaagaaaattatggtctacactgaaaattacatcgaattctaatgggggatcatatgtttaaccgaccgaaccgcaacgacgttgatgatggcgtgcaggatatccagaatgatgtcaatcaattagctgacagcctcgaatctgtattgaagtcctggggcagcgacgccaaaggggaagctgaagccgcacgcagtaaagctcaggcattgctgaaagaaaccagggcgcgaatgcatggtcgtactcgcgtccagcaagccgcgcgcgatgccgttggctgcgcggattcttttgttcgtgaaagaccctggtgtagcgtgggtacagcagctgcggtaggtatttttatcggcgcactgttaagcatgcgcaaatcgtagtgcaaaaatgataataaatacgcgtctttgaccccgaagcctgtcttcggggtttctttttgcctggtgaatcacaaaaatccccctaccccgtcacgctcatatccagggtaatttcgaccactatttgctatatattgtgtggttgaatcttttttcaactacatctagtatctctgtatcaacagagagacaacccgacgcgtatcatcgcgccgtatcttcattttaaacggaaatacgaatcatgcgcattactatttacactcgtaacgattgcgttcagtgccacgccaccaaacgggcgatggaaaaccggggctttgattttgaaatgattaatgtcgatcgcgttcctgaagcggcagaagcgttgcgtgctcagggctttcgtcagttgccggtagtgattgctggcgatcttagctggtctggtttccgtccggacatgattaaccgtctgcatccagcgccacacgcggccagtgcatgagccagctcgtctacttctccagcagctccgaaaacacgcagcgttttatcgaacgtttaggtctgcccgcggtgcgcatcccgctcaatgagcgggaacggattcaggtagacgagccttacatcctgatcgtgccctcttacggcggcggcggtacggctggcgcggtgccacgacaggtaattcgctttttaaacgacgagcacaaccgggcgttgcttcgcggcgttattgcttctggtaatcgcaactttggtgaggcgtatggccgcgccggagatgtgattgcccggaaatgcggcgtgccgtggctgtaccgttttgaactcatgggtacgcaaagcgatatcgaaaacgttcgtaaaggagtaaccgaattttggcaacgacaaccgcagaatgcctgacgcaggaaacgatggattaccacgcgctgaatgcgatgcttaacctctacgatagcgcaggtcgcattcagttcgataaagaccgccaggccgttgacgcctttattgcgacgcatgtgcgtccgaacagtgtgaccttcagtagccagcagcagcgcctgaactggctggtcaacgaaggttactatgatgaaagcgttcttaatcgctactctcgcgactttgtcattacgctgtttgcccacgcacacaccagcggttttcgtttccagacattcctcggggcatggaagttttacaccagctatacgttgaagacattcgacggtaaacgttatctggaagattttgccgatcgagtaacgatggtggcgctgacgctggcacaaggcgatgagacgctggcgttgcaactgaccgatgaaatgctgtcaggacgctttcagccagccacgccaacattcctcaactgcggtaagcagcagcgcggcgaactggtttcctgttttttgctgcgtattgaagacaatatggagtcgattggtcgggcggtaaattccgcactgcagctgtcgaaacgcggcggcggcgtagcatttttgctgtcgaatctgcgagaagcgggcgcgccaattaaacgtattgaaaatcaatcttctggcgtaattccggtgatgaaaatgctggaagacgcattttcctatgccaaccaactcggcgctcgtcagggggctggtgcagtctatttacatgctcatcatcccgatattctgcgttttctcgacacgaaacgggaaaatgccgacgaaaaaatccgcattaaaacactgtcgcttggcgtggtgatcccggatatcactttccatctggcaaaagagaatgcgcagatggcgctgttttcgccttatgacgtagagcgagtttatggcaagccgtttgccgatgtggccatcagccaacactatgacgaactggttgccgatgaacgcattcgcaaaaaatacctcaacgcccgtgatttcttccagcgactggcagaaatccagtttgagtccggctatccctacatcatgtatgaagacacggtaaaccgtgctaaccctatcgccgggcgcataaatatgagtaatctctgctcagaaattttgcaggttaacagcgcctcagagtatgacgagaatctcgactatacccgcacaggccatgatatttcctgcaatttaggttcgttgaatattgcgcacaccatggattcccccgattttgcccgcacggtagagactgccgtgcgcggtttaacggcagtatcagatatgagtcatatccgcagcgtgccgtccatcgaagccggaaatgccgcctcgcacgccatcggactggggcagatgaatttacacggctatctggcgcgagaaggcatcgcttatggttcgccggaagcactggatttcaccaatctctatttctatgccatcacctggcatgcactgcgtacctcgatgttgctggcacgcgaacgcggtgaaaccttcgccgggttcaaacagtcacgctatgccagtggtgaatattttagccaatatctgcaagggaactggcagccgaaaacggcgaaagttggcgaactgtttacccgtagcggtattacgttacctacccgtgagatgtgggcgcagctgcgcgacgacgtgatgcgctacggcatatacaaccagaatcttcaggcggtgccgccaaccggttctatctcttatatcaaccatgctacgtcgagtattcatccgattgtggcgaaagtagagatacgcaaagagggcaaaacaggacgcgtttactaccctgccccgtttatgactaacgagaatctggcgctgtatcaggacgcttacgaaattggcgcagaaaagatcatcgacacctacgcggaagcgactcgccatgtcgatcaggggctgtcgctgacgctttttttccccgataccgccaccactcgcgatatcaacaaagcgcagatttacgcctggcgcaagggtatcaaaacgctctattacatccgcctgcgtcagatggctggaaggcactgaaattgaaggctgcgtctcctgtgcactttaaggaatatctatgaaactctcacgtatcagcgccatcaactggaacaagatatctgacgataaagatctggaggtgtggaatcgcctgaccagcaatttctggctaccagaaaaggtgccgctgtcgaacgatattcctgcctggcagacattaactgtcgtagaacaacaactgacgatgcgcgtttttactggcctgacgctgctcgacacgctgcaaaatgttatcggcgcgccttctctgatgcccgatgcactcacgcctcatgaagaagcggtattatcgaatatcagctttatggaagcggttcatgcccgctcttacagttcgattttctcgacgctatgccagaccaaagatgtcgatgccgcctacgcctggagtgaagaaaacgcaccgttgcagcgaaaagctcagattattcagcaacattatcgcggtgatgatccgctgaaaaagaaaatcgccagtgtgtttcttgaatcttttttgttctattccggtttctggctgccgatgtatttttccagccgcggaaagctgaccaataccgcggacctgatccgtctgattatccgcgatgaagcagtccacggttactacataggctataaatatcagaaaaacatggaaaagatatctctgggacaacgtgaagagttgaagagtttcgccttcgatttgttgctggaactctacgacaacgagttgcaatacaccgatgagctgtacgccgaaaccccgtgggctgacgatgtgaaagcgtttctctgttacaacgccaataaggctttgatgaatctgggctacgaaccgttatttcccgcagaaatggcggaagtgaatccggcaatcctcgccgcgctttcgccgaatgccgatgaaaatcacgatttcttttccggttcaggctcctcttatgtgatggggaaagcggttgaaacagaagatgaagactggaatttctgagggtgttattttcaaaaatatcactacccgcagcagggaaataattcccgccaaatagctttttatcacgcaaataatttgtggtgatctacactgatactctgttgcattattcgcctgaaaccacaatattcaggcgttttttcgctatctttgacaaaaaatatcaactttctcgatttgctctcagcccttatatcacgggaaattccggcgatttgctcgcatcaatattcatgccacatttgccatcaggggttgcctcagattctcagtatgttagggtagaaaaaagtgactatttccattgggtaatatatcgacatagacaaataaaggaatctttctattgcatggcaattaaattagaaattaaaaatctttataaaatatttggcgagcatccacagcgagcgttcaaatatatcgaacaaggactttcaaaagaacaaattctggaaaaaactgggctatcgcttggcgtaaaagacgccagtctggccattgaagaaggcgagatatttgtcatcatgggattatccggctcgggtaaatccacaatggtacgccttctcaatcgcctgattgaacccacccgcgggcaagtgctgattgatggtgtggatattgccaaaatatccgacgccgaactccgtgaggtgcgcagaaaaaagattgcgatggtcttccagtcctttgccttaatgccgcatatgaccgtgctggacaatactgcgttcggtatggaattggccggaattaatgccgaagaacgccgggaaaaagcccttgatgcactgcgtcaggtcgggctggaaaattatgcccacagctacccggatgaactctctggcgggatgcgtcaacgtgtgggattagcccgcgcgttagcgattaatccggatatattattaatggacgaagccttctcggcgctcgatccattaattcgcaccgagatgcaggatgagctggtaaaattacaggcgaaacatcagcgcaccattgtctttatttcccacgatcttgatgaagccatgcgtattggcgaccgaattgccattatgcaaaatggtgaagtggtacaggtcggcacaccggatgaaattctcaataatccggcgaatgattatgtccgtaccttcttccgtggcgttgatattagtcaggtattcagtgcgaaagatattgcccgccggacaccgaatggcttaattcgtaaaacccctggcttcggcccacgttcggcactgaaattattgcaggatgaagatcgcgaatatggctacgttatcgaacgcggtaataagtttgtcggcgcagtctccatcgattcgcttaaaaccgcgttaacgcagcagcaaggtcttgatgcggcgctgattgatgcgccgttagcagtcgatgcacaaacgcctcttagcgagttgctctctcatgtcggacaggcaccctgtgcggtgcccgtggtcgacgaggaccaacagtatgtcggcatcatttcgaaaggaatgctgctgcgcgctttagatcgtgagggggtaaataatggctgatcaaaataatccgtgggataccacgccagcggcggacagtgccgcgcaatccgcagacgcctggggtacaccgacgactgcaccgactgacggcggtggtgctgactggctgaccagtacgcctgcgccaaacgtcgagcattttaatattctcgatccgttccataaaacgctgatcccgctcgacagttgggtcactgaagggatcgactgggtcgttacccatttccgtcccgtcttccagggcgtgcgcgttccggttgattatatcctcaacggtttccagcaattgctgctgggtatgcccgcaccggtggcgattatcgttttcgctctcatcgcctggcagatttccggggtcggaatgggtgtggcgacgctggtttcgctgattgccatcggcgcaatcggtgcctggtcgcaggcaatggtgactctggcgctggtgttaaccgccctgctgttctgtatcgtcatcggtttgccgttggggatatggctggcgagaagtccgcgagcggcgaaaattattcgtccactgcttgatgccatgcagaccacgccagcgtttgtttatctggtgccaatcgtcatgctatttggtatcggtaacgtgccgggcgtggtggtgacgatcatctttgctctgccgccgattatccgtctgaccattctggggattaaccaggttccggcggatctgattgaagcctcgcgctcattcggtgccagcccgcgccagatgctgttcaaagttcagttaccgctggcgatgccgaccattatggcgggcgttaaccagacgctgatgctggccctttctatggtggtcatcgcctcgatgattgccgtcggcgggttgggtcagatggtacttcgcggtatcggtcgtctggatatggggcttgccaccgttggcggcgtcgggattgtgatcctcgccattatcctcgatcgtctgacgcaggccgttgggcgcgactcacgcagtcgcggcaaccgtcgctggtacaccactggccctgttggtctgctgacccgcccattcattaagtaactctgcacttgcccggtgacgccgggcattatcaccctgccaaaaaaaggaataacaatgcgacatagcgtactttttgcgacagcgtttgccacgcttatctctacacaaacttttgctgccgatctgccgggcaaaggcattactgttaatccagttcagagcaccatcactgaagaaaccttccagacgctgctggtcagtcgtgcgctggagaaattaggttataccgtcaacaaacccagcgaagtagattacaacgttggctacacctcgcttgcttccggcgatgcaaccttcaccgccgtgaactggacgccactgcatgacaacatgtacgaagctgccggtggcgataagaaattttatcgtgaaggggtatttgttaacggcgcggcacagggttacctgatcgataagaaaaccgccgaccagtacaaaatcaccaacatcgcacaactgaaagatccgaagatcgccaaactgttcgataccaacggcgacggaaaagcggatttaaccggttgtaaccctggctggggctgcgaaggtgcgatcaaccaccagcttgccgcgtatgaactgaccaacaccgtgacgcataatcaggggaactacgcagcgatgatggccgacaccatcagtcgctacaaagagggcaaaccggtgttttattacacctggacgccgtactgggtgagtaacgaactgaagccgggcaaagatgtcgtctggttgcaggtgccgttctccgcactgccgggcgataaaaacgccgataccaaactgccgaatggtgcgaattatggcttcccggtcagcaccatgcatatcgttgccaacaaagcctgggccgagaaaaacccggcagcagcgaaactgtttgccattatgcagttgccagtggcagatattaacgcccagaacgccattatgcatgacggcaaagcctcagaaggcgatattcagggacacgttgatggttggatcaaagcccaccagcagcagttcgatggctgggtgaatgaggcgctggcagcgcagaagtaatttttattcgggcggataaggcgtttttgccgcatccgccgttctgtgcacaatgcctgatgcgacgctggcgcgtcttatcatgcctacaaaccacatcgcacatttcaacaatctatctttcatcccatattcatcaacatccgctattattgatttccagcttaatcatcacctgatgaacaaaaataatgactaaacctaatcatgagcttagcccggcgctgatcgtgctgatgtctatcgccaccggtctggcggtagccagtaactattacgcccagccattgctcgacaccatcgcgcgtaacttttccctttccgccagttcggcaggctttattgttaccgccgcgcagttgggctatgccgcaggtctactgtttcttgttcccctcggtgatatgtttgaacgccgccgcctgattgtctcgatgaccttactggcggcatgcggcatgttgattaccgccagcagtcagtcgctggcgatgatgatcctcggtacggcattaaccggtttattctcagtcgtggcacaaattctggttccgctggcagcgacgctggcttcaccggataaacgcggcaaagtggttggcactattatgagcggtctgctgttggggatcttgctggcacggacagttgccggattgctggcgaatctcggcggctggcgcaccgtcttttgggttgcttcggtgttaatggcactgatggcgctggcattatggcgtggtctgccacaaatgaaatcagaaacccacctcaactacccacagttgttgggttccgttttcagtatgtttatcagcgataaaattctgcgtacccgcgcgttgctgggctgcctgacctttgccaatttcagcattctctggacctcaatggcctttttgcttgccgctccaccttttaactacagcgatggtgtcattggtctgtttggacttgcgggagctgccggagcgttgggcgctcgtccggcgggcggttttgccgataagggcaaatcgcaccacaccacaactttcggtctgctgctgctattactttcatggctggcgatctggtttggtcacacttccgtactggcgttgattatcggaatcctggtgctggatctcaccgtgcagggcgtgcatatcactaaccagacggtaatttatcggatacatcctgatgcgcgcaatcgcctgaccgcaggttacatgactagctactttattggcggtgccgccggttcgctaatttcagcctcagcctggcaacatggcggttgggctggcgtttgtctggctggcgcgacgattgccctggttaacttactggtctggtggcgaggttttcatcgtcaggaagccgcaaattaagcaatcagcaaccgttttcgtggctttacacttataagggtgttaagaagcccatcagtctgataaggttaagatattcattcagtctatttataatattaacaatcgttaagcgtacactctatggaaagccctactccacagcctgctcctggttcggcgaccttcatggaaggatgcaaagacagtttaccgattgttattagttatattccggtggcctttgcgttcggtctgaatgcgacccgtctgggattctctcctctcgaaagcgtttttttctcctgcatcatttatgcaggcgcgagccagttcgtcattaccgcgatgctggcagccgggagtagtttgtggattgctgcactgaccgtcatggcaatggatgttcgccatgtgttgtatggcccgtcactgcgtagccgtattattcagcgtctgcaaaaatcgaaaaccgccctgtgggcgtttggcctgacggatgaggtttttgccgccgcaaccgcaaaactggtacgcaataatcgccgctggagcgagaactggatgatcggcattgccttcagttcatggtcatcgtgggtatttggtacggtaataggggcattctccggcagcggcttgctgcaaggttatcccgccgttgaagctgcattaggttttatgcttccggcactctttatgagtttcctgctcgcctctttccagcgcaaacaatctctttgcgttaccgcagcgttagttggtgcccttgcaggcgtaacgctattttctattcccgtcgccattctggcaggcattgtctgtggctgcctcactgcgttaatccaggcattctggcaaggagcgcccgatgagctatgaggttctgctgcttgggttactagttggcgtggcgaattattgcttccgctatttgccgctgcgcctgcgtgtgggtaatgcccgcccaaccaaacgtggcgcggtaggtattttgctcgacaccattggcatcgcctcgatatgcgctctgctggttgtctctaccgcaccagaagtgatgcacgatacacgccgtttcgtgcccacgctggtcggcttcgcggtactgggtgccagtttctataaaacacgcagcattatcatcccaacactgcttagtgcgctggcctatgggctcgcctggaaagtgatggcgattatataacccacaagaatcatttttctaaaacaatacatttactttatttgtcactgtcgttactatatcggctgaaattaatgaggtcatacccaaatggatagttcgtttacgcccattgaacaaatgctaaaatttcgcgccagccgccacgaagattttccttatcaggagatccttctgactcgtctttgcatgcacatgcaaagcaagctgctggagaaccgcaataaaatgctgaaggctcaggggattaacgagacgttgtttatggcgttgattacgctggagtctcaggaaaaccacagtattcagccttctgaattaagttgtgctcttggatcatcccgtaccaacgcgacgcgtattgccgatgaactggaaaaacgcggttggatcgaacgtcgtgaaagcgataacgatcgccgctgcctgcatctgcaattaacggaaaaaggtcacgagtttttgcgcgaggttttaccaccgcagcataactgcctgcatcaactctggtccgcgctcagcacaacagaaaaagatcagctcgagcaaatcacccgcaaattgctctcccgtctcgaccagatggaacaagacggtgtggttctcgaagcgatgagctaacgcgtcatctcgctcaaaaatccagatttataaaagaaaaaatgactggccagcatcgcaacatgctggcctttttggcaagcaggtcggctcagccgatgagttaagaagatcgtggagaacaatatgagcgcaaatgcggagactcaaaccccgcagcaaccggtaaagaagagcggcaaacgtaagcgtctgctcctccttctcaccttgctctttataattattgccgtagcgatagggatttattggtttttggtactgcgtcacttcgaagaaaccgatgacgcatacgtggcagggaatcaaattcaaattatgtctcaggtgtctggcagcgtgacgaaagtctgggccgataacaccgattttgtaaaagaaggcgacgtgctggtcactctcgacccgacagatgctcgccaggcgtttgaaaaagccaaaactgcactggcttccagcgttcgccaaacccaccagctgatgattaacagcaagcagttgcaggcgaatattgaggtgcagaaaatcgccctcgcgaaagcacaaagcgactacaaccgccgtgtgccgctgggcaatgccaacctgattggtcgcgaagagctgcaacacgcccgcgacgccgtcaccagtgcccaggcgcaactggacgtcgcgattcaacaatacaatgccaatcaggcgatgattctggggactaaactggaagatcagccagccgtgcaacaggctgccaccgaagtacgtaacgcctggctggcgctggagcgtactcgtattatcagtccgatgaccggttatgtctcccgccgcgcggtacagcctggggcgcaaattagcccaacgacgccgctgatggcggtcgttccagccaccaatatgtgggtggatgccaactttaaagagacgcagattgccaatatgcgtatcggtcagccggtcactatcaccacggatatttacggcgatgatgtgaaatacaccggtaaagtggttggtctggatatgggcacaggtagcgcgttctcactgcttccagcgcaaaatgcgaccggtaactggatcaaagtcgttcagcgtctgcctgtgcgtatcgaactggaccagaaacagctggagcaatatccgctgcgtatcggtttgtccacgctggtgagcgtcaataccactaaccgtgacggtcaggtactggcaaataaagtacgttccactccggtagcggtaagcaccgcgcgtgaaatcagcctggcacctgtcaataaactgatcgacgatatcgtaaaagctaacgctggctaatccagaggtgcgtgtgatgcaacagcaaaaaccgctggaaggcgcgcaactggtcattatgacgattgcgctgtcactggcgacattcatgcaggtgctggactccaccattgctaacgtggcgatccccactatcgccgggaatctgggctcatcgctcagccagggaacgtgggtaatcacttctttcggggtggcgaatgccatctcgatcccgcttaccggctggctggcaaagcgcgtcggggaagtgaaactgttcctttggtccaccatcgcctttgctattgcgtcgtgggcgtgtggtgtctccagcagcctgaatatgctgatcttcttccgcgtgattcaggggattgtcgccgggccgttgatcccgctttcgcaaagtctattgctgaataactacccgccagccaaacgctcgatcgcgctggcgttgtggtcgatgacggtgattgtcgcgccaatttgcggcccgatcctcggcggttatatcagcgataattaccactggggctggatattcttcatcaacgtgccgattggcgtggcggtggtgttgatgacactgcaaactctgcgcggacgtgaaacccgcaccgaacggcggcggattgatgccgtggggctggcactgctggttattggtatcggcagcctgcagattatgctcgaccgcggtaaagagctggactggttttcatcacaggaaattatcatccttaccgtggtggcggtggtggctatctgcttcctgattgtctgggagctgaccgacgataacccgatagtcgatctgtcgttgtttaagtcgcgcaacttcaccatcggctgcttgtgtatcagcctcgcgtatatgctctacttcggcgctattgttctgctgccgcagttgttgcaggaggtctacggttacacggcgacctgggcaggtttggcctctgcgccggtagggattattccggtgatcctgtcgccgattatcggccgcttcgcgcataaactggatatgcggcggctggtaaccttcagctttattatgtatgccgtctgcttctactggcgtgcctatacctttgaaccaggtatggattttggcgcgtcggcctggccgcagtttatccaggggtttgcggtggcctgcttctttatgccgctgaccaccattacgctgtctggtttgccaccggaacgactggcggcggcatcgagcctctctaactttacgcgaacgctggcggggtctatcggcacgtcgataaccacgaccatgtggaccaaccgcgagtcgatgcaccatgcgcagttgactgagtcggtaaacccgttcaacccgaatgcccaggcgatgtacagtcaactggaagggcttgggatgacgcaacagcaggcatcaggctggattgcccagcagatcaccaatcaggggctgattatttccgccaatgagatcttctggatgtcagccgggatattcctcgtcctgctggggctggtgtggtttgctaaaccgccatttggcgcaggtggcggcggaggcggtgcgcactaagtacaactaagccagttcatttgaactggcttttttcaattaattgtgaagatagtttactgactagatgtgcagttcctgcaacttctctttcggcagtgccagttcttcgttgctgttgatgcgtacgtcacgttccagaatgctacgcgcaatatcctgcgcttcctgcaacgagtgcatctggtaagtgccacactggtagacgttcagttccgggatctgattctgatcctgcactttcagcacgtcttccattgccgctttccaggcatcagcaacacgctgctcatctggcgtaccaatcagactcatataaaaaccggtgcggcagcccattggcgagatatcgataatctctacaccattaccgttaagatggttacgcataaaaccagcaaacaggtgctccagggtatggatccctctttctggcatcacttctttgttcggcacgcagaagcgcagatcgaacacggtgattgcgtcgccatgcggggtgttcattgttttcgccacccgaactgcaggcgcttccatccgggtatgatcgactgtgaagctatctaacaacggcatttagccacctccggtaattttttaaaaattttctgaactctttcttcccaggcgagtctgagtatatgaaagacgcgcatttgttatcatcatccctgaattcagagatgaaattttggccactcacgagtggcctttttcttttctgtcaggcgtgtttttccagccacaccgcaaacggttcggtatcagcggcttccatttcctgctgacggcgttcagacgcctcgcgctcggctacaaaatcctcttcgcgcagaatttccagcggctcttcacgcagcagattacggtaggcttctgcaaatgctttgcctgttccgccaataccagtatcaatcatagaccttaagatacgggcagagaaagtcagatcgggattatcgaagcaggcaaccagttcatcacacactttctgatacgcttcgccgccgttaatactatccagcgtttgcgcgacgcgtttcagatcgcggaacagatctttacccacctgcggtaacgggaactgtgcggtttcgcagccgatacccagcgtcagacccggtttgcgaccttcgaggatcacccggttccagttaacgcgtgtacaggcaagttcgctactgctcatttccggtgcatcagccagcgcacaccagaccataaacaggtcgaggaatcgcacctgctgttcatctacaccaatcggcgagaacgggttgatgtccagcgaacgcacttcaatatattcaatgccgccacgtaacagcgcatcagaaggcgactcgccgctgcgggtaacgcgttttggacgaatcggcgcgtacagttcgttttcaatctgcaacacgttgctgttgatttgcagcctcttaccgtctttctcaataccaatcttcgcgtactcttccgatggcgttttgattgcctgtttaaggcccgctacgtactcgtaaagatcgttgaaggtaataccaagattgctttgcgatttattggtatagccgagatcgctcaaacgaagagaggtcgcatacggcaggtaatacataccgcactcggttttctcaaacggcagcgacgttggttttccttgcaggaaagaagaacaaatcgccggagatgcaccaaacagataaggaatgacccaaccgaaacgatagtaattgcggataacgcggaaatagcccgcagaaattttctctttggcatcagcgcccgagatatcaccgcacttcgcttgccagaatgccattggcaaagagaaattgtagtgcacgccggaaatggtttgcatcagcgcgccgtagcgatttttcagcccttcacgatacagcgttttaaagcgtccggtgttagaagtgccgtactgtgccagttcgatgtcctgaccttctgcgatgtagcatggcatacttaacggccacatccgctcatcgcccatattgcgcgccgtataacgatgcagatcgcgcataaaggtcagcatatgttcaatatcaccatccactggtgtaatgaattccagcaatgcttccgcaaaatcggtagtaatccatttgtgcgtcagtgcggaacctaatgcttcaggatgacctgttgttgccagtgtgccatcagcattaacacgcaaagtttcgcgctccagcccacgctgtatcccctttaacgcctgaggatgtttttccagccaggccagcgcctgtgatacgtccgggatcaaattgacctcccgcctgtcaaaatcgttttaattagcataactgtaatggtgaccatatgtgcaggcctacaattagtgccaccacatcatgccctgaacggtcgctgctgcaactgcaacatagcgtaacgctttaccaaggcacaaaaaaaagattaccggtccccacgagatgcgcatccatcccgctaacagacacagtaaatcgccaaccacgggcatccagcttaataatagcgtgacagcaccatagcgtttcagccagccggtagctttctcttgccagcgcgatgttttacgcaatggaaagaaacgcccaaggataacgttagttaaccctccaaggctattacccattgttgctgttaaaactaaaacccagggatgactgatcccggaaagcaacattgccaccagcacgacttcggagttgccgggtaatagtgtagcgctgagaaaactactggcaaacaacgagaaaagcgataacgcttcactcacagcaagcgaacatccacggcgtccatgcctgctgcacgggccgcctgaataccgaaatcggcatcttcaaagaccacacactgcgtcggttgcacgcccatacgctgcgcgcacaacaaaaatgtgtctggcgcgggtttatggtgtttgacgtgatcggcagcgacgacggcgtcaaaataatggcgtaatcccaggtgcgccagcaatgcctcagcgatggcgctttcactccccgttcctacagccattgggcgacgaccatgccaacttttcaccacatcaacaagaggaagcggttcgacgctatccagcagcatacttcttactgcttctgttttttcacgcgctaacgcatgcgggtcgagatcggcctgattcagctcaataattgcctgagcaatacgccaggtgggcgatccattaagcgcaatcatcgcctgaatatcgtactgaagaccgtagtgccctaatacttcgcgccacgctttacggtgcgtaggctccgtatccaggattgtgccatccatatcaaaaattaaacctgcataacgctcgtacatggtcttctcgcaagtcgaaaaatatgacgctactttagcgtaattgcttgattttgtcgctgatggcgaaggagaagaaaattcaggaaatggataaaggagttatttagaaatgagatatttttgaaggaaattttttggagaagatggtgcatccgggaggatgactcactgacgttcgcccttcgggccgttgctggcgcaacgttatccttcctggtgcctgcggttaataccgctatctcttcgataccttcattgctgaaggttacggagaatatggtgcatccgggaggattcgaacctccgaccgctcggttcgtagccgagtactctatccagctgagctacggatgcatcgggaaaacttattctactgctgatattgataccgctactaaagccatatcaattaagagatggtgcatccgggaggattactcgccttgcggctcgcccttcgggccgttgctaaagcaacgttatcatccctagtgcctgcggttaattccgctacctcttcgataccttcattgctgaagatttcggagaatatggtgcatccgggaggattcgaacctccgaccgctcggttcgtagccgagtactctatccagctgagctacggatgcatcgggaaatttattttactgctgatattgataccgctactaaagccatatcaagtaagagatggtgcatccgggaggattcgaacctccgaccgctcggttcgtagccgagtactctatccagctgagctacggatgcatcgggaaacttactttactgcagattttttgataccgctactaaagccgtatcaagtaagagatggtgcatccgggaggattactcgccttgcggctcgcccttcgggccgttgctaaagcaacgttatcctccctggtgcctgcgcttattaccgccacctcttccataccttcatcgctgaaagtacgtagaatatggtgcatccgggaggattcgaacctccgaccgctcggttcgtagccgagtactctatccagctgagctacggatgcaaatggcggtgaggcggggattcgaaccccggatgcagcttttgaccgcatactcccttagcaggggagcgccttcagcctctcggccacctcaccacacgcctcttacgagtgcttcgaagaacttgtttatcgctcatcgtcgctgcgtggcgcacatattactttctgagacttataagtcaaacaatttttcctacacttttatcgtttgcacacttcacgttcaattagtctgtaaaaacgtcaaaaagagtgttttatcaacagaagaatggaggtctgacagatagtagtaatgcaaaaaaatggagacttaagttgaatgaacgggagtaaagcgaaaagactatagagtgaaggagaaattttgagggtgcgtctcaccgataaagatgagacgcggaaagattagtaactggactgctgggatttttcagcctggatacgctggtagatctcttcacggtgaacagaaacttccttcggggcatttacgccaatacgtacctggttgccctttacccctaaaactgtcacggtgacctcatccccaatcatgagggtctcaccaactcgacgagtcagaatcagcattctttgctccttgaaagattaaaagagtcgggtctctctgtatcccggcattatccatcatataacgccaaaaagtaagcaatgacaaacacattacatctaagcagtcatggcattacattctgttaaacctaagtttagccgatatacacaacttcaacctgactttatcgttgtcgatagcgttaatgcgaatgccgtgaagcgagtccacggcattgcctgacgcttatattattgcaatttcgcgctgacccagcctttcacactggctaacgctgcaggtaaggccgcagcatccgtaccaccggcttgcgccatgtcaggacgtccaccacccttgccgcccacctgctgagcgaccataccaatcagttcccctgctttcacacgatctgtgacgtccttagatacgcctgcaatcagagaaaccttaccttcgactaccgttgccagcacgataattgtcgaccccagctgattttttaaatcgtcaaccatggtacgcaacattttcggctcaacaccgctaagctcgctaaccaacagcttaacaccattaacatcaattgccttactggaaagatttgcgctctcctgtgcggcagcttgttctttaagctgttgtaactctttttccagctgacgcgtacgttccagtactgagcgcactttatcagccagattattgctatcgcctttcagcagatgcgcgacttcgcttaagcgatcgctgtctgcatgaacggtggcgatagcaccttctccggttaccgcttcgatacgacgaacgcctgcagcagtacccgattcagagatgatgcggaacagaccaatatcaccagtgcggctggcgtgagtaccgccacacaactcggtagagaaatcgcccatgctcagcacgcgtacgcgctcatcatacttctcgccgaacagcgccatcgcacctttcgctttcgccgcttcgagatccatgatgttggtttcgatcggcaaattgcgacgaatctgtgtgttcaccaggtcttcgaccgcacgaatctcttctggtttcatcgcttcgttgtgtgagaagtcgaagcgcagcaccttgtcgttaaccagtgaacctttctgcgatacatgagtacccagaacctggcgcagcgcagcgtgcatcaggtgcgttgcggagtgattcagacgaatacgggcgcgacgagcctcatcaacatcagcctgcaccgcgtcgcccactttcagagaacccgcagcaagtttaccgatgtgaccaatcgcctggccgtatttctgcgtatcttccaccgcaaaggagaagttagcgcctttcagttcgcctttatcgccaacctgaccgccggattccgcatagaatggcgtttgatccagcacgaccacagcttcctggcctgcattgatggcatcaaccgctttaccatcaacaaacagcgcagtcactttgccgttcagttccagatggtcatagcctttaaattcagatgcactgtcaacacggatcattgcgttgtaatcggcaccaaagccgctggcttcgcgcgcgcgacgacgctgctcttccattgcagcttcaaaaccagcttcgtcaactttgatgttgcgctcacgacaaacatcagccgtcaggtcaaccgggaagccataggtgtcgtacagacggaaagcagtttcaccatccagcgtatcaccagaaagttttgccagctcttcatccagcaacgccagaccgcgctccagagtacgagcaaactgctcttcttcagtcttcagcacctgctcaacctgcgcctgctggcgtttcaggtcttcacccgcagagcccataacgtcgatcagcggaccaaccagtttgtagaagaaggtttctttcgcgccgagcatattaccgtgacgcactgcgcgacgaatgatacgacgcagtacataaccacggttttcattggacggcattacgccatccgcgatcaggaacgcacaagaacgaatgtggtcagcgattacgcgcagcgatttattgctcagatcggttgcgccagtgactttcgctaccgcctggatcagcgtgcggaacaggtcgatgtcatagttagagttaacgtgttgcagcaccgcagcaatacgctccagacccataccggtatctacagacggcttcggcagcggttccatcgtgccatcggcctggcggttgaactgcatgaagacgatgttccagatctcaatgtagcggtcgccgtcttcttccgggcttcccggaggccccccccaaatgtggtcgccgtgatcgtagaagatttcggtgcacgggccgcacggaccagtgtcacccatctgccagaagttgtcagatgcgtatggcgcacctttgttatcgccgatgcgaataatacgttcgcgcgggatccctacttctttttcccagatttcgtaggcttcgtcgtcgctttcatagacggtaacccacagacgctctttcggcagggcaaaccatttttcgctggtcagcagttcccatgcaaactgaatggcatcgtgtttgaaatagtcgccgaagctgaagttgcccagcatttcgaagaaggtatggtgacgcgcggtgtaaccgacgttttccaggtcgttgtgtttaccacccgcacgcacgcagcgttgggaagtggtagcgcgggaataattacgcttgtcgagcccaaggaacacatccttgaactggttcatcccggcgttggtaaacaacaaagttgggtcgttatggggtaccagggagctgctggcaactacctgatgtcccttactatggaaaaagtcgagaaacgcctgacggatctcagcggtgctcttgctcataattatcctgaaatcaagctaacgaaatatcgccaccagctccagcgtgtcttaaccgccgggctggtaactgaaaagtgggaataagataagttttcttgactgggaagtaaaataccgtatgcgttcagtcggcaaaatttcgccaaatctcctggatatcttccatcagatagccacgatagagcagaaaacgctggatcttaactttttctgaaaagacagttggcaaaggttcgccatattttcgcgtcgcctgatcgcgcgccagtgcgcaccagtcgatgtcacattcacgcatcgctttttctgtcgcttcgcgggaaatacctttctgattcagttcctggcgaatacgcgcaggtccataacctttgcggctacggctggcgataaagcgcgcaacaaatcggctgtcatcgagatagccatgttcatggcaccaggcaataacgcgctcgtaatcttctgccgtagcatcaatctcttctgggccatttttgcccataatcggtgccgcgagtttacgtcgcagttcttgctcactgtgatcgcgcaccgccagaatgcgtaccgcacgatccaacaggcgagcatatgccgggcgacgggatgttgattctgtcatggcatatccttacaacttaaaaaagcaaaagggccgcagatgcgccccttgtgtatcaaacaagacgattaaaaatcttcgttagtttctgctacgccttcgctatcatctacagagaaatccggcgttgagttcgggttgctcagcagcaactcacgtactttcttctcgatctctttcgcggtttccgggttatctttcagccaggcagtcgcattcgctttaccctgaccgatcttctcacctttgtagctgtaccacgcgcctgctttctcgatcagcttctcttttacgcccaggtcaaccagttcgccgtagaagttgataccttcgccgtagaggatctggaattcagcctgtttaaacggcgcagcgattttgttcttcaccactttcacgcgggtttcgctacccaccacgttttcgccctctttcaccgcgccgatacgacggatgtcgagacgaacagaggcgtagaatttcagcgcgttaccaccggtagtggtttccgggttaccgaacatcacaccaattttcatacggatctggttgatgaagatcagcagcgtgttggactgcttcaggttacccgccagcttacgcatcgcctggctcatcatacgtgccgcaaggcccatgtgagagtcgccgatttcgccttcgatttccgctttcggcgtcagtgccgccacggagtcaacgacgataacgtctactgcgccagaacgcgccagggcgtcacagatttccagtgcctgctcgccggtgtccggctgggagcacagcaggttgtcgatatcgacgcccagtttacgtgcgtagattgggtccagcgcgtgttcagcatcgataaacgcacaggttttaccttcacgctgcgctgcggcgatcacctgcagcgtcagcgtggttttaccggaagattccggtccgtagatttcgacgatacggcccatcggcagaccacctgccccaagcgcgatatccagtgaaagcgaaccggtagagatggtttccacatccatggaacggtcttcacccaggcgcatgatggagcctttaccaaattgtttctcaatctggcccagtgctgccgccaacgctttctgtttgttttcgtcgatagccatttttactcctgtcatgccgggtaataccggatagtcaatatgttctgttgaagcaattatactgtatgctcatacagtatcaagtgttttgtagaaattgttgccacaaggtctgcaatgcatacgcagtagcctgacgacgcaccgcatcacggtcgccgctgaagcattcccgccgggtaatgccttcaccgcgggcagtggcaaaagcaaaccagacggtgccgacaggcttctcttcactgccgccatccggcccggcgataccactaatagacacggcataatcagcacgagccgctttcagtgcgcctatcgccatttccaccacgacgggttcactcaccgcgccatgctgcgccagcgtctcttcgcgtacgccgatcatctgcgctttggcttcgttactgtaggtgacaaatccgcgttcaaaccaggcggagctaccggcaatatcggtaatcactttcgctacccaaccaccggtacaagactcggcagttgttacggttgcgccacgggctttcagcgcctgcccaacctgttcacttaactgcatcagttcactgtcagtcatcacaacctctgtcagtcaaaaatttatgccggacaagatagcactttcgtcaggaagatggtgttggcgttgcaattttacgaggaggattcagaaaaaagctgattagccagagggaagctcacgcccccctcttgtaaatagctactgtactcgcgccagcgccacggcttgtcctaactgccagaccgccattgcgtaatgggtgctgtggttgtaacgggtgatggtgtagaagttcggcagaccgtaccagtactggtagccggtgccaacatccagacgcagcaggctggcttgttgatggttgcccagcggctgctgtggcgttaaacctgcggcggcaagctgcgaaatgctgtacttagttttgaagccatttggcaagcctggagcctgaccgtttgccattaccgcgacctgatcgcctttcacccagccgtgcgctttgaaatagttcgccacgctaccgatcgcatcaaccggatcccacaggttgatatgcccgtcgccgctgaaatctaccgcatattgtttgtaagacgacggcataaactgtccgtagcccatcgccccggcaaaggaacctttcagattgagcggatcgtcctgctcgtcgcgcgccatcaacaggaaggtttccagctcgccagagaaatactccgcgcggcgtgggtagttaaatgacagcgttgccagcgcatcgaggatgcgagttttccccatcacgcgcccccagcgggtttcaacgccgataatcccgacgataatttccggcggtactccatacacctgccacgcgcgattcaacgcatcttcatactgattccagaaaaccacaccgttctgcacgttgtccggcgtaataaattttttgcgataacggagccatgcgccgttcggacctgatggcggtttcaccgatgtggttggtgcctggttatccatcagccgcagtaccgaatccagacgcttcgcctgggagagaatttcctgcaactgctgacgatcgaaaccgtgtttgttcaccattttgtcgatgaactgctgggcattcgggttattagcgaaatcgccgcccatctgcatcacattgtgctgcggctcaagcaggaagccgccagacggcgttccggtggtcgtatcagtctcagtaggttttggcttgctgctacaggcggcaagcaacacaaaaaggggaagcaatgttacataacgacgcttgaacatgaggggtccatttaacagattcaaccaggggcaagtatggtaaagcatcacgccccgcacaaggaagcggtagtcactgcccgatacggactttacataactcaactcattcccctcgctatccttttattcaaactttcaaattaaaatatttatatttcattttgcgatcaaaataacacttttaaatctttcaatctgattagattaggttgccgtttggtaataaaacaataaatcctgaaggagagaacaatgatagaaaccattactcatggtgcagagtggtttatcgggctgttccaaaagggcggagaggtgtttaccgggatggtgaccggcattcttccgctgttgattagcctgctggttatcatgaacgcactgattaattttatcggtcagcatcgtattgaacgttttgctcaacgttgcgccggtaaccctgtttcccgttacctactgttaccgtgcattggcacgtttgtcttttgcaatccgatgaccctaagcctgggtcgctttatgccggaaaagtacaaacccagctactacgcggcggcctcttatagctgccactcaatgaatggcctcttcccccatatcaaccctggcgaactgtttgtttatcttggcattgccagcggtctgacaacgctgaacctgccacttggcccactggcggtgagttatctgctggttggtctggtcaccaatttcttccgcggctgggtgaccgatctgaccaccgccatttttgagaaaaagatgggcattcaacttgaacaaaaagttcacctggcaggagcaacatcatgacgcatattcggatcgaaaaaggaacgggtggctggggcggcccgcttgagctgaaagccacgccgggaaaaaaaatcgtctatatcaccgccggtacccggcctgcgattgttgacaaactggcacagcttactggctggcaggctattgacggatttaaagaaggtgaacccgcggaggcggaaattggtgtcgcggtaatcgactgtggcggcacattacgctgcggcatctatccgaaacgacgtattcccaccattaatatccactcgacgggcaagtccggtccgctggcgcagtacattgtggaagatatttatgtctctggcgtaaaagaagaaaacatcactgtagtaggtgatgcgacaccacaaccctcttccgtgggccgtgactatgacaccagtaagaaaatcaccgaacaaagcgatggtttactggcgaaggtgggaatgggcatggggtccaccgttgcggtgctgtttcaatctggtcgtgacaccatcgacactgtattaaaaaccattctgccgtttatggcattcgtctcggcgctcattggcatcattatggcttctggccttggtgactggattgcccacggtcttgctccgctggcgagccatccactgggtctggtcatgctggcgctcatctgttccttcccactgctttcacctttcctcggcccaggcgcagttatcgcacaggttatcagcgtattgattggcgtgcagattggtctcggcaatattccgccgcatctggctttaccggcactgtttgccatcaacgcgcaggcggcctgcgacttcatcccggtcggtttgtcgctggcggaagcccgtcaggacacggttcgcgtcggtgtcccttctgtactggtgagccgctttttaaccggcgcgccgactgtactgatcgcctggtttgtctccggttttatctatcaatagaggctgaaacatgaccgttatttatcagaccaccatcacccgtatcggcgcgagtgccattgacgccctcagtgaccagatgctcatcacctttcgtgaaggcgcgcctgcggacctcgaagagtattgcttcattcattgccacggcgagttgaaaggtgcactccatcccggtttgcaattttcactcgggcagcatcgctatccggtgaccgctgttggcagcgtggcggaagacaaccttcgcgaactgggtcatgtcaccctgcgcttcgatggtttaaacgaagcggaatttccgggcactgtccatgtggcaggccctgtccccgacgatatcgcgccgggatcggttttgaagtttgaatctgttaaggagtaaaaaatgaatcaggttgccgttgtcatcggtggtgggcaaaccttaggcgcgttcctgtgccacggtctggctgccgaggggtatcgcgtcgcggttgtcgatattcagagcgacaaagccgcaaatgtggcacaagaaattaacgccgaatatggtgaaagtatggcgtacggttttggtgctgacgccactagcgagcaaagcgttctggcgctctctcgtggggtagatgaaatctttggtcgcgtggatttgctggtctacagcgccggaatagcaaaagcagcctttatcagcgacttccagctcggcgattttgaccgttcgctacaggtgaatctggtgggttatttcctgtgtgcgcgtgaattttcgcgtttgatgatccgcgacgggattcaggggcgcattattcagatcaactcgaaatccggcaaagtgggcagcaaacacaactctggctacagcgcagcgaaatttggtggcgtcgggctgactcaatcactggcgctggatctggcggagtacggcattacggtgcattcactgatgctcggtaacctgctgaaatcgccgatgttccagtcactgttgccacaatacgcgaccaagctgggtatcaaaccggatcaagtcgagcagtattacatcgacaaagtaccgctcaaacgcggctgcgattatcaagatgtgctgaatatgctgctgttctacgccagtcctaaggcgtcgtactgcaccggacagtcgatcaatgtcaccggcggtcaggtgatgttctgatcaacagcggagatccattaaggatctccgtgagactatagaatgcctgatgcgctacgctcatcaggcatacaggacttccgccactacattaaggaaaagttatggtatccgcactcatcaccgtcgccgttatcgcctggtgtgcgcaactggccttaggcggctggcaaatttctcgttttaaccgtgccttcgacacactatgccagcaagggcgggttgccgtgggccgttccagcgggcgctttaaaccgcgggtcgtggtcgccatcgcgctggacgatcagcagcgcatcgtcgacaccttgtttatgaaaggactgaccgtcttcgcccgaccgcaaaaaattcccgcaattaccggtatgcatgcgggtgatttacagcccgatgtgatctttccccatgatccactatcacagaatgctctatcattggcgcttaaactgaaacgtggataatttcgttgtgaatgttacttgcttgcgaagttatcattttgaaacctaaatcaggtaatcacgcccatgaaacctcgtcagcgtcaggccgccattctggagtatctgcaaaagcagggtaaatgctcggttgaagaattggcgcaatactttgacaccacaggcacaaccattcgcaaagatctggtcattctggaacatgccggaaccgtcattcgtacttatggcggagtggtgttgaataaagaggaatccgatccgcctatcgatcataaaacactcatcaacacccacaagaaagagctgattgcagaagctgccgttagttttatccatgatggcgattcgatcattcttgatgctggcagtaccgttttgcagatggttcccctgctctcgcgctttaataacatcacggtgatgaccaacagcctgcatatcgtcaatgcgctatccgaactggataacgaacaaactatcctgatgccaggcggaacgtttcgcaaaaaatcggcctcatttcacgggcaactggcagagaatgccttcgagcatttcaccttcgataaattgtttatgggcaccgacggcatcgatctcaatgcgggcgtaaccacctttaacgaggtttataccgtcagtaaggcaatgtgcaatgccgcgcgcgaagtgattttgatggcggactcatcaaagtttggccgtaaaagccccaacgtagtttgcagtcttgaaagcgtcgataagctgattaccgacgcaggtatcgatccggcgtttcgtcaggcgctggaagagaaagggatcgatgtgatcataaccggagagagcaatgagtgaagcactactgaacgcgggacgtcagacgttaatgctggagttgcaggaagcaagccgtttaccggaacgtctgggcgatgattttgttcgcgccgccaatatcatcctgcactgtgaaggcaaagtggtggtttcgggaattggcaaatcgggccacattggtaagaaaatcgccgcaacgcttgccagtaccggcactccggctttttttgtccatccggcagaagcgctgcacggcgatctggggatgatcgaaagccgcgatgtgatgctgtttatctcttactccggtggcgcgaaggaactggatctgattattccgcgtctggaagataaatctatcgcgctgctggcgatgaccggcaaaccgacgtcaccgctgggcctggcggcaaaagcggtgctggatatctccgtagaacgcgaagcctgcccgatgcaccttgcgccgacctccagcaccgtcaataccctgatgatgggtgacgcgctggcgatggcggtcatgcaggcgcgcggatttaatgaagaagattttgcccgctcccacccagccggggcactgggcgctcgcttgctgaataaagtgcatcatctgatgcgccgtgacgatgccatcccacaggtggcgttaaccgccagcgtgatggatgcgatgctggaactcagccgcaccggtctggggctggtggcggtatgtgacgctcaacaacaggtacaaggcgtctttaccgacggcgatttacgtcgctggctggttggcggcggcgcactcaccacgccagtcaatgaagcgatgacggtcggcggcaccacgttgcaatcgcaaagtcgcgccatcgacgccaaagagatcctgatgaagcgcaaaatcactgccgcaccggtggtggatgaaaacggcaaactcaccggcgcaataaacctgcaggatttctatcaggccgggattatttaatccttcaatcccagacgtttcgccagccgatgcaggttggcgacgtcggtttccagcatccgcgcgcaggcagcccagttgtgatgattttgtgccagtgcctgacgaatagtttcacgctggaacgcttctgtcgcttcacgcaggttttgcttaacaacgggcaccgccgccacttctggcgtcggcaacgtcacctcaggaaaagcaaaatgttgcgcctcaagaatcacttcatcgccgctgcgggtggctctcgccagaactaccgcccgatgaatagcatgttccagttcgcgcacgtttcccggaaaactgtagtgttgcagtaaatttcgcgctccggcacttaataccacgcgggagagcccctgccgcaaacgacactgctcgcagaaataccccgccagcagaatgacatcatcgccccgctcacgcagcggcggcaccgaaagtggaaacacgctcaggcgatgaaacaaatcggcgcggaatcgccctgccagcacctcttcgcgtaaatcgcggttagtcgccgccagcacgcgcacatcgacccgcaaacaacggtcatcgccaacgcgctgaatatcgccatactgcaacaccctcagcagcttggcctgcaatgccaacgacaactcgccgatctcatccagaaacagcgtgccgttatccgccatttcaaacttcccgctgcgattactgatagcgccagtaaacgctcctttcacatgcccgaacaactcactttccgccacactttccggcagtgcagcacagttgagatagaccagcggattcaccgcccgtggcgaggcttcatgaatcgctttcgccaccagctccttaccggttccagtctcaccgctgatcaggacgttgagatcggacgccgccacaatctcaatctcttttttcagttgcgtcatgccaggggacaagccaatcatctgcgtctgtttcaccgcttcaaacggcgtggcatcgcctggcagcatattctggctttccagttgttcaatcagcaacgcattgcttaacgctcccgccgccagcgcagcaatcagccgtagctcttcgtcgctgaaaacatcgaactgatcgggctgcatcccgtcgagcgtcagtgcgccgatcaggttttgcccggcaaacaatggcagaccaacgcaggcgtgaaccttcagactctcctgcccaggaatcaaaccgtcatagggatcgggcaattcgctgtctgcgggaaagcgcaccacatccccggcgcgggcaatcgcttccagccgtggatgcccttccagcgcaaagcgtctaccgagtacatcctttgccagaccgtcgatggcaagcggaataaactgccgcgaatcgtaacgtagcaacgcagacgcatcgcactccagcacctgacgtagcgtggtgatcaggcgctgaaaacgatcctggtgaccaatcccacgctgcaattcgatggcgatattcgccagcacatcaacggaaaaactcatctttgcctcactgtcaatttgactatagatattgtcatatcgaccatttgattgatagtcattttgactactcattaatgggcataattttatttatagagtaaaaacaatcagataaaaaactggcacgcaatctgcaattagcaagacatctttttagaacacgctgaataaattgaggttgctatgtctattgtggtgaaaaataacattcattgggttggtcaacgtgactgggaagtgcgtgattttcacggcacggaatataaaacgctgcgcggcagcagctacaatagctacctcatccgcgaagaaaaaaacgtgctgatcgacaccgtcgaccataaattcagccgcgaatttgtgcagaacctgcgtaatgaaatcgatctggcggatatcgattacatcgtgattaaccatgcagaagaggaccacgctggggcgctgaccgaactgatggcacaaattcccgatacgccgatctactgtactgccaacgctatcgactcgataaatggtcatcaccatcatccggagtggaattttaatgtggtgaaaactggcgacacgctggatatcggcaacggcaaacagctcatttttgtcgaaacaccaatgctgcactggccggacagcatgatgacttacctgacaggcgacgcggtgctgttcagtaacgatgctttcggtcagcactactgtgacgagcatctgttcaacgatgaagtggatcagacggagcttttcgagcagtgccagcgttactacgccaatatcctgacgccgttcagccgcctggtaacgccgaaaattaccgagatcctgggctttaacttaccagtcgatatgatagcgacctcccacggcgtggtctggcgcgataacccgacgcaaattgtcgagctgtacctgaaatgggcggctgattatcaggaagacagaatcaccattttctacgacaccatgtcgaataacacccgcatgatggctgacgctatcgcccaggggattgcggaaaccgacccacgcgtggcggtgaaaattttcaacgtcgcccgaagcgataaaaacgaaatcctgaccaatgtcttccgctcaaaaggcgtgctggtcggcacttcgacgatgaataacgtgatgatgccgaaaatcgccgggctggtggaggagatgactggtttacgcttccgtaacaaacgcgccagtgctttcggctctcacggctggagcggcggtgcggtggatcgtctttccacgcgcctgcaggatgcgggtttcgaaatgtcgctcagcctgaaagccaaatggcgaccagaccaggacgctctggagttatgccgtgaacacggtcgcgaaatcgcccgtcagtgggcgctcgcgccgctgccgcagagcacggtgaatacggtagttaaagaagaaacctctgccgccacgacggctgacctcggcccacggatgcagtgcagcgtctgccggtggatttacgatccggcaaaaggcgagccaatgcaggacgttgcaccaggaacgccgtggagtgaagtcccggataacttcctgtgcccggaatgctccctcggcaaagacgtctttgacgaactggcatcggaggcaaaatgagcaacggcattgtgatcattggttcgggcttcgccgcccgacaactggtgaaaaatattcgcaaacaggacgccactattccattaaccttgattgccgccgacagcatagatgagtacaacaaacctgacctcagccatgttatcagtcaggggcaacgtgccgacgaccttacccgccagacggcgggtgaatttgccgagcagtttaatctgcgcctgtttccgcacacctgggtgacggatatcgatgccgaagcccatgtggtgaaaagccagaataatcagtggcaatacgacaagttagtgctggcaaccggtgccagcgcctttgtcccgcctgtgcctgggcgtgagttaatgctgacgttaaatagtcagcaagagtatcgcgcctgtgaaacgcaactgcgggatgcccgacgcgtgttgattgttggcggtggtttgattggtagcgaactggcgatggatttttgtcgtgcaggcaaagcggtcacgctaatcgacaacgctgccagtattctggcgtcgttaatgccaccggaagtaagcagccgcttgcagcatcggttgacggagatgggtgttcatctgctgttgaaatctcagttgcaggggctggaaaaaacggattctggcattctggcaacgctggaccgccagcgtagcatcgaagtggatgcggtaattgccgccaccggactgcgcccggaaaccgccctggcacgacgcgccgggctgacgattaatcgcggcgtttgcgtcgatagttatctgcaaaccagtaataccgatatttacgcgctgggcgattgcgcggaaattaacggtcaggtattgccgttcctccagccgattcaacttagcgcgatggtgctggcaaaaaatcttctcggcaataacacgccgctgaaactcccggcgatgctggtgaaaatcaaaacgccggaattaccgctgcatctggcaggcgaaacccagcgtcaggatttacgctggcaaattaataccgaacgccagggaatggtggcgcgcggcgttgacgatgctgaccagcttcgcgcctttgtggtcagtgaggatcggatgaaagaggcatttggattgttgaaaacattgccgatgtaggtgggctactgtgcctaaaatgtcggatgcgacgctggcgcgtcttatccgacctacggggacgcatgtgtaggccggataaggcgtttacgccgcatccggcaatggtgtccaaatgcaacacgttttatccgttctggacttcacccgctaaccaacgcgccgcagcaataaccccctgccccagagacaaaccgccatcacccgccggtaaactctgtggaaagagcaatgtgaaatcagcgagataatgcgccagacgtgcacgcagcaaacggttatgaataaccccgccgctaaataccagcgtagtgataccacgcatcgtggcctgctcacgcatcaacgcggcaaaaccctgcgccagcgcatcatgaaacgcccacgcgcgttgattaaccggtgcctgccagttcagccactgctgccagaaagtggcgagatccagttgattgtccacccgcggcattgtcaccggatgcgtcactccgtggcatgaggctgcgagcgcctccagagcacaagccgcttcaccttcataacttaacgtggctggcgcacagcccagtgccgccgccactgcatcgaaaaaacgcccacacgatgacgccagcggcgcgttaattccacgctcaatggcccgcgccagcacgctccagttttgctgttgcacacttgctgtttcagagtaattctgccactccggcacaaagcgcaggcactgcgccagcaggtttcgccacggctgcttcgctgccaaatcgccacccggaagcgccactgcaggcaagccgcccaggtgctcacattcgcgatagttcacccgcaggcactcgccgccccacaaagcgccgttctcccccataccgataccgtcgagcgtcaaagcaatgacatcaccgccatccagcggccactgatgctctgccagacacgccgctgcatgggcatgatgatgcagtaccgtttgcgtcggcagattcatttcacgcgcccactggctggagacatagcccggatgcgcgtcatgcacaacgtattgcggggtaaaatcgtagatgttttgcatcaggcgtaacgcttcgcgccactgcatctggatgccatcgtcacttaaatcgcccagatgctgactcaacaccgcttgttcaccgcgcaccaggcagaaggtatttttcagatccgcgccgagacacagcacaggcggaacatttttaaagcccggaggcaaagccagcgcatccggcacatacccccgcgaacggcgcagcatttcgccgctttcgcgcaccaccgaatcatccatccgctgcacgatgtcgcggttatgtatcaagaatccgtcggcaatgccctgcaaatccgccagcgcctgttcgttgctgatagctggtggtttaccgctcaggttgccggaggtcatcaccagcgggcattgcagttcctgtaacagcaaatgctggagcgggttcgcaggcaacattaccccgacttcgttaaggtcaggggcgatatcatcacaaagctcaggaacgtattttttatccaccagcacaatcggcgcggcgggcgtggtaagcaactggcgcgcagcgtctggtaaaccgtcagccactggcaacatgaccgccagcggtttcgccgggcgatgtttgcgcgcccgaagtgtcgccaccgcgttactgttacgtgcatcgcaggcaagatgaaatccgccaatccctttgatggcgacaattttgcccatttttaactgtgcgatagctgcctgtaatgccgcctcttgttccgcatgttcaccatgacttacccattcaagatgcgggccacactccgggcaggccaccggctgggcgtggaagcgacgatcgagcgggtcacggtactctttgtcacaggccggacatagcggaaacgccgccatcacggtaaacgggcggtcgtaaggcatggcgcgaataatggtgaaacgcgggccgcagtgggtacagttgataaacggataacgataacgccgttcgcctggggtattcatttcggcaaggcaagcagggcaagtagcggcatcgggaacaatttgcgtattcatggtgccgcctgtgctctggcgtatagtgaactcggtgggcagttgtgaccagataaacggctcacgctcgacgctatcaatacgcgccagcggcgggcagtgctgatacaattgaacaagaaacgtttccgggtcttcccgcagccggacttctacgccatcgccgtcattacagacatcgccgtgaagatttaattgctgtgccagctgccagacaaacggacgaaaaccgacgccctgcactttgccacgaatacgcagttggacaccgcaagatgtgttttttgccattgagttattcccgccatcatgaattgcgtaacccgccctgccggacacgacagcgtcgcatccggcagtcacaggtcggcgataccgcccgctccgtattctacgaatatttccgggaattcctttgatgccagaacagttctgtaagatttttagaacatcagcgccgtacggcggcgtttttctgcgctcagttgttcaagtttattacgatcgacacaaatcagcgcatgagtcgggcaagccgccatacacgccgggccgtcttcacgatggttgcacaggtcgcatttattggcttcggctttgtcagcccgtacattcagacccgcgccgctgttgcggatcaccggacgtaccaccacttccatcgcaccatacgggcaagccacaacgcaggttttgcaaccaatgcaacgttcctgcatcacatgaacaaaccctttatcacggctgatagcaccattcgggcagacgttagcgcacggtgcatcttcacactgacggcaaactgtcgccgtggaaatgttcacacctttaatgacatggatacgcggtaaaaaagtttccggggtcagcgatgcacagtcctgattttcctgatgagaaaccacgcacgctacttcacaggtacggcaaccaatacatttactcgcgtcagcaatgatgaaacggttcatcaaattctccagcaatgacagttaatgcgccgatacattcacaaatcatgccagtttttaatttactgttatttaaggaaattaatttctgtaatgcaggaaaaacgatgtcatcgacactagtgacgatgacatgtgatgacaatgtttatcgcgaaggagcaatgagtgagtcgcggcggatcagttttccgctgaaggttttcggcggtgagaaatccccgccatcgagcataaaaatcagccgtccaataatttcctgaatcatctcagtcaccggaatttttacgctggagagcgccggaacggtgtagggggcaatagcgatatcatcgaatccgataactgacacctgctctggcaccgctacgccgcgctcgtgtaacgctttcatcgcacctatcgccatatcgtcgttactggcaactaacgcgctaaatttagccccacgttcgagcaacatttctaccccttcggccccgctggcaggcgtccatttaccgttagcgataagtttttcattgagcgcaataccatgctgcgccagcgcgtctttatacccggcaagacgttcaatgctggtgggggaatccatcgagccggtaaggaaagcaatctcctgatgcccggcgtttatcaactctgccacggcgttaaaactggtctgtttatgatcgcaccagacgctatggctgctgtttttgcgcaggcggcgattaagcaccattatcggctgactgtgcgcgtcaatgatgtcatcgatctcatccacgcttaaaaaacgcgggtaaatcatgatcgcgtcgcagcgcagatccagcagatactgaatcgcctggcgctcttcttctgcgctgtgtttaccatctgccaatagcaactgccgccctttctcttccgccattcgcgcggcatgaaagagtaattcactaaaataaatgccgtggtaaagcgtgttggtcactaccagccccagcgtctgagtactcttcgccgacagattgcgcgccagcaagtttggacggtaaccgctctcttctaccgcctgaaacacgcgatctttagtctcctggctgacgtagccattacctgaaagcacgcgggaaacggtcgcttttgaaaccccggcgcgcttcgccacttccagcatcgtcgtcatcattttcatccctttacacgcaatcaacgcagtgtactgcaccgtttgccgattgtccttgcacaatcggcgggaaaaatattcaggtgaccggtttcacaaatataaaaaatgaacaattcactctcttgcttatttagtgacaactattcatgattttgtgaaaccggtttcttaattccgtttcagcatcggcatttttccgtcacgtcgactgataacaactacatctaccctactgataacaggataaaatccgatggccaaaaattatgcggcgctggcacgctcggtgatagcggcactgggcggcgttgataacatctcggcggtcacgcactgtatgacgcggttgcgctttgttatcaaagatgatgcacttatcgacagcccgacgttaaaaaccatccccggcgtgctcggcgtggtacgtagtgacaaccagtgtcaggtgattatcggcaataccgtttcacaagcctttcaggaagtcgtcagcctgctgccgggagatatgcagcccgcacagcccgtgggtaaacccaaactcacgctacgtcgcattggtgcggggatcctcgatgcgctgatcggcaccatgtcaccgctgatcccggcgattatcggcggatcgatggtcaaactgctggcaatgatcctcgagatgagcggcgtgctgacaaaaggatcgccgaccttaaccattctgaatgtgattggtgacggtgctttcttcttcctgccgctgatggtcgcggcatctgccgccatcaaatttaaaaccaatatgtcgctggcgattgccatcgcgggtgtgctggtacatccgagttttattgaactgatggcgaaagcggcccagggtgaacatgtcgaatttgccctgattccggtcaccgcggtgaaatacacctacacggtgatcccggcgctggtgatgacctggtgcctgtcatatatcgaacgctgggtggacagcattacaccggcggtgaccaaaaacttcctcaaaccaatgctgattgtgttgattgccgcaccgctggcaatcctgctgattggcccgattggtatctggatcggtagcgccatttcggcgctggtttacaccattcatggttatctgggctggctttcagtcgccattatgggcgcgctgtggcctctgctggtaatgaccgggatgcaccgcgtctttacgccaaccatcattcagaccattgccgaaaccggcaaagaagggatggtcatgccgtcagagatcggcgctaacctgtcgctgggcggttcatcactggcagtggcgtggaaaacgaaaaacccggaactgcgtcagacggcgctggctgcggcggcatcagccattatggcggggatttccgaaccggcgttatatggcgtggcgatccgcctgaaacgtccgcttatcgccagtcttatcagcggttttatttgcggcgcggttgccggtatggcggggcttgccagccactcaatggcagcgccggggctatttaccagcgtgcagttcttcgatccggcgaatccaatgagcatcgtctgggtgttcgcggtcatggcgctggcggtggtgctgtcgtttatcctcacactgttgctcggctttgaggatattcctgttgaggaagcggctgcccaggcgcgaaagtatcagagcgtacaaccgaccgtcgccaaagaagtaagtcttaattgaggatgaaaatgtcagtatttccagaaagttttttatggggcggcgcgcttgccgccaaccagtctgaaggtgcgttccgtgaaggtgacaaaggtctgaccactgtcgatatgatcccacacggcgagcatcgaatggcggtgaaactggggctggaaaaacgttttcagttgcgagatgacgagttttatcccagccatgaggcgacggatttttatcatcgttataaagaagatatcgccctgatggcagagatgggattcaaggttttccgtacctcaattgcctggagccgtctctttccgcagggcgatgaaatcacgcccaatcagcagggcattgctttttatcgttctgtctttgaagagtgtaaaaagtacggtatcgaaccgctggtcacgttgtgccacttcgatgtgccgatgcatctggtcaccgaatatggctcctggcgtaaccgcaagctggtggagtttttcagccgctacgccagaacctgctttgaagcatttgatggtctggtgaaatactggctaaccttcaatgaaatcaacattatgttgcatagcccgttctccggcgcgggtctggtgtttgaagaaggtgaaaatcaggatcaggtgaaatatcaggccgcgcatcaccagctggttgccagtgcgctagccaccaaaatcgcccatgaggttaacccgcaaaatcaggtgggctgtatgctggcgggcggtaacttctacccttacagttgcaagccggaagatgtctgggcggcgctggagaaagaccgggaaaacctgttttttatcgatgtgcaggcgcggggcacgtatccggcttactctgcccgcgtattccgcgaaaaaggggtaaccatcaacaaagcaccgggcgatgatgaaatcctgaaaaacaccgtcgattttgtctctttcagctattacgcctcgcgctgcgcctcggcggagatgaacgccaacaacagcagtgcggcgaacgtggtgaaatcgctgcgtaatccgtatctacaggtgagcgactggggctggggaattgatccactcggtctgcgtatcaccatgaatatgatgtacgatcgttatcagaagccgctgtttctggtggaaaacggcctgggcgcaaaagatgaatttgctgccaatggcgagattaacgacgactatcgcatcagctacttacgcgaacatatccgcgcaatgggcgaagcgattgcagacggcattccgctgatgggctacaccacatggggctgtattgatttagtttccgcctctacgggtgaaatgagcaaacgctacggctttgtctttgttgaccgtgacgacgcaggcaacggtacgctgacgcgcacgcgtaagaaatcattctggtggtataaaaaagtgattgccagtaatggggaagatttagagtaggtaacagtgccggatgcggcgtgaacgccttatccggcctacatgtcgcacgaaccatgaaggcccgataagcgcagcgcatcgggcaatttagcatttggcatcagagctggttcaccccatcaagaacatccctgtcctgattccttaatgaaaaactactcttcttccaccgctaactgcgcgaagccgccatttccttcccagccttccagtcgttgataaacggtttctaccgcatctttaatcggctgggtcatcgggtagtaaaagccgacgatatccggctgaatgccgaggaaaatcacttcgccaatatcttctttcaactggtcgataaggtaattcaacggcatgttatgggtagtcatcataaacatctcggcgatatcatccgggtcgatgatgcggatctcgccggggtttagccccatatccgtggcgtcgacaatcagcagtcgtgtcgggcgcagttcacggatagcgacgatgtcgttttccggtgcgctaccgccgtcaatcaccacccagttacctttcggcgcggcggcgcacttttccgccagcagcggacctgcgccatcatcgcccatcatgctattgccaacacagagtaaaacgtcagtcacgcagtctcctcaccatcaaatagatggcgttttcctgatgaatatcatgcagcatacttaacagcattgtactccattcctgctgctgcgaagtttgcgctgcccgggctttatcgaatgcgttggccagcatcggcacatggttaatgtcgatgacgatctcaccatatttcggcacgccttccattttgcggcgggcttcactgcctgcctccagagtggcaatccatgccagatattcatcccacgggcaggtgagcgccgcttccaggcaatcgataaccccaaggtggtgaccaatcgccaggctgtaatagaccacctgctgcgcctcggcgggcgtggcatcgttctcatcaataaatttacggctcagttgactgaacaccaccttttcactcatcggatacgcgcctcttcaacaacatgattcagatggctgacaatctcgttcagacgcggatcgttttccgcttccagccagcgtgcaacctgttcttcgccctgccctaactgtgtaaggtaatcatcggcaatctgacgaccgtaacgataacccgccaggcgacgtgcttcgcgatccactttcacgcgcagcggctgcaccatatcaccatgcaggatctccgccggttgttcatccagttcacccggcccacgggcgtgaattttctgctccagcaggccgagcgccattgcaaagccgtacagcgtggcggcaggcgttggcgggcagccagggatataaacatccacagggacaattttatccgtaccgccccacacgcagtagagatcgtggaagatcccgccactgttaccgcaggcaccgtaggagatacaaattttcgggtccggcgcggactgccacgcacgcagcgcaggggatcgcattgcacgggtgaccgcgccggtaaacagtaaaatatccgcatgacgcggtgaaggaacgactttaatgccgaagcgttctgcatcaaacagcggcgaaagcgtggcgaaaatttcgatttcgcaaccgttgcagccgccgcagtccacgcggtaaacataggcagaacgtttgatttttttcagtaacgacgccttcatgctggcgatggattcatccaccgtcatggggaccggaatgccgttggcgtcacgggggcctaataaattgctcatcagatggcctctttcatatggcgagtcagttcaatacggtcggacggcaccaggcatttctggcgcttacattccgggcaagtctcaaagctttcgcggtggttttccgcgcggctgtcgccgttgtgcttaagcagcgcaatggcgtagtcgatctctttctggacggcgaaaggacgattgcagacgcggcagttgcacagcgcgaagcgggactgttgcaggaagtcttctttcttccacaccgccagttcgtactcttgcgacagtttgatcgccgccgtcgggcagacttcttcgcagcgtccacagaagatgcagtgcccaagattaaactcccaggcaagctctcctgtggcgaggtcagtttcaaccgttaaggcgtttgacgggcaggcattgacgcaggccgcgcagccgatgcactgctgcgggttctgctctggcttaccacggaagtttttatcaaccgcaatcggctccagcggataagacgaggtcgccgtgccggttttgatgacttttttgataaaggtaaacatggcgattccttatttcagcggcgagtttttacgctcaatgctgtaacgctcgagttctttgtacggcaccactttgctcttcttcttacgcacatcgaccacggtcatgcggtcggtacaggagtagcaagggtcgaggctaccgataatcagcggcgcatcggaaacggtgttgccgcgcagcatgtagcgcagggtcggccagttcgcgtaggtcgcggcacggcagcgccagcggtacagcttctggttgtcgccggtcatgctccagtggatatcatcgccgcgcggcgcttcggcaaagcccagcgcaaagcggtgcggaatgtaggtaaagccttccaccatcagtgggccacccggcaggttatccagaccgtagtcgatcatgttcagcgcggtatagacttcgttgatacgcactttcagacgggaaataacgtcgcagccctgctcgctgtggacttccattggcagcaggccatagccgacaaacgggtgatcggcgcgggtatcacgggcgtgaccgctggcacggaccatcgggccgacgttactgaagtcgcgagcgatttccgggtccagacgaccaatgccgacagtgcgctgttccatgttcggagtgctcagcagcacatccaccagctcctgcacttcacgacgcatctgttgtgccagctggcgggtctggatcatgtcgtctttcagcagatcgcgacgaatcccgccgatcaagttcaggccgtaggttttacgcgcaccggtaaggatctctgccattttcatggaggtttcacgcacgcggaagaactgcataaagccggagtcgaagccggtaaagtgacaggccaggccaaggttgagcagatgcgagtgcaagcgttctacctccagcagaatggcgcggatcatctgcgcacgttctggcacctgaatacccatcgcgttttccaccgacgtggtgtaggcggtgctgtgggcaaagccgcagatcccgcacacacggtcagagaggaaggtcacttcgttataacccatacgggtttccgccagtttttccatgccgcgatggacgtagaacagacggtagtcggcgtcgataatgttttcgccatcgacgaacagacggaagtggcccggttcatcagaagtgacgtgcagcggaccaatcggcacgacgttgtttttcttatcgcccagttcgttgatgaactcgtaggtttcagcatcggtggtcggtgccggacgctgacgataatccatgctgtctttacgcagcggataaagttcatccggccagtcatccggcagcaccagacgacgttcatccggcagaccaaccggaatcaaaccgtacatatcgcgcacttcacgctcgccccacaccgccgccggaacgcgcggcgtcacggacggatattccggtttgttggcgtcaacttcgacgcgaaccgtaatccaacacttagtgcccttctccatcgacagcacgtagtaaacggcgtaatgaccattcagtttgcgttcgtcgttaccaaacagcaccgacagccagccaccctgtttgtagtaaagaaactccaccacttccggcaggtagttcacctttacggtgacagtcagctgatctttggtctgccaggcgtggtccagcacgacgcccggaaatgcctcattcagcgcggcgagataatgttgacctaatttttcttcagacatgctcaaactctctttaatcacgccgccagcaaggagacgaacgctaaaaatgcaaagccaaacccagcccaggtaatgcgcggagtaatatcaagacgcagacgggccatgctgttttcgaacagcgcgataaccaggacgccgaccaccagttttacgatggcaatcaccagcgccagcagcagtccaccggcggtgaaggtttccatttgtccccacggaataaacaccccgacgaacatctgcaacaccaccagctgtttcaggctgataccccatttcatgacgccaaagccgctgccgctgtattcagagagcgggccttcctgcagctcctgctcggcttccgccaggtcgaacggcagtttgcccatttcgataaaggtggcgaacgcacaggcacaaagcgccagtaccagcgggatgctctggctcagcggccagtgataaacggtgtcggtgatgttgctgatgttggtggaaccggcaacctgtgcggcaacccacagaccaagcagcagcatcggttcgaccagcacgccaagcatcgcttcacggctcgcgccgatagcggtaaacgggctaccggtatccagaccagaaatggcaaagaagaaacgcgcgatggcaaagagatacagtaaggtgatcaaatcacccagttgcggcagcggagaaccgacggtcaccaccggcagcgcagtagcgatagtcagcatgacgcccaccatcacatacggcgtcaggcggaacacccagccggaggcatccgggccgacgctctgacgccccagcagtttgataatgtcgcgatactcctgcaacacgcccggcccgcgacggttatgcaagcgggcgcgcgccacgcgggttataccggagagcagcggcgcaacggcaaataacaccagcgcctgaattaacggatataaaacactcattctcaggctcctcgtgaaacaataatcaccaccagtaccgccagttcaaccagcgccatccggcggaacagcaacgcactcccctcgcactgccagcccggcaccagagacaccggattcagccatttgcgtagtttcagcaccggcgcaaacgcctgtttcaccggcatggcaaaaccgtgagcggtaatcaccattgatttttcgtggtcgtaaccgcacacccaggccgcaccgcgggaacgcgatggcaaacgatcgcctttgcaaatcgccataatgatgaatggcagcagcgggcaggcaatcagcagcaacgtgatcatcggttgagaaacggtggtgttagcaggctccagcggcagaggtacagcagcagagagcatcggcagtagccacggcgcagcaacaccgccaattacgcagcaaatcgccagtgccactacgcttacgctcatcaggagcggcgcacaggtggcgttttcggcttctttggtgcgcggcgcgccgaggaacgtgacgccatagactttcgccatacacatcaccgccagcgcaccggtaattgccagccccacagcgagcagcggccccagcagacgggcaacaaacgcgccactattgctcagtttgaaaaatgattgatagataacccattccccggcaaaaccattcagcggcggcagcgcagccattgccatcagcccgactaacatggcgatggagataaccggcattttcttgccaataccaccgagtttttcgatatcgcgatgaccggtacggaaccagacgctccccgccccgaggaacagtacgcttttgaacaggctatggttaagcagatggtacagaccaccgaccaggccaagagcaatcagcgccggttgttcgagcgcgatacccgttacgccagcgcccagccccagcaggatgatgccgatattttccagggtgtggtaagccagcaggcgctggatgttgtgctccaccagcgcatacagaccaccgacaaacgcggtgatcatgccgagcaccagcagcgcgatcccccaccacagcggtgcattaccgcccagcagtgacagggttaaaatgcccagcaggccaattttcatgactaccgtagaaaacaacgcggcagctggcgcagaggcgttcgcatgtgcctgcggcacccagccgtgcagcggaataatcccggccagcaggccaaagccaatcactccgagcagccagatatcggaaccgagcggcagctgttgcatacgcatatccagcaggcgcagatccagcgtgccgtaacgctgccacagcagccagcaagcaatcgccagcagcagagtgccaagacgccccagcgcaaaccacagtttgccctctttgctgttgctggtgaggaacaccgcgcacagggccatgatttcggccattaccacgaacatgccgaggttgctggcaatgacggcgcagacggcggcagccatcaacatattgatctgcaagccgttgcacttcacctgcgcgtggcgatgccagtcaatgttgtagaggctgacaaacagaccgcacagaccgagcgtaatcagccaaatcgcgttaagcggagagatttgcacatcgtagcttaccagcgacagcgcaccgctcacgccaaccgcgccagtcagtacagtgaagcccgcggctgccgtatacagactaccaaccgcgccgccaattccagctatccagccacttaacgctttttgaaaagaaaagagaaatgccagaacagcggcggcgacaaaccacgccacgccgctattgatcagggaaattgcgctcatttagcctctccactttgagcctgctgaaacaaggtgagatcgccaaagtccgtgttaaaggtcagctcacgcttacgtttgctgacgcgggcgatatcggtgttatccaccagatgcagggctttagtcgggcacatccgcacgcaggccggaccttgttcatcaaagctacaaaggtcacatttgacggcgatcgcgcgaatacctggcacccagtcaagcaatgtgctgacacgcgccggagcaggcggtgccggtggcgctttcggggtattggcgtttgccggaatatccagcggacggctgccggaaaattcaattgcgccaaacgggcaggcgatgccgcacagcttgcagcttacgcacaggctttcattcaactgcacggccccatcgacgcgggtgatggcgttaaccgggcagaccaccgcgcagggtgcatcttcacagtggtgacagagctgcggcgcagattctttttcattcagcatcactctcaggcgcggcattgattgcaggccgtgctggcgatgcgtctctgaacaggcggcctcacaagtgtggcagccgatacagagcgtggagtcagcaattacaaaacgattcaccaggcattcctcaggtgattgtcatttttgacgaaaacatgccgatgaaatgtcattttcgacactcatcgacacgcccatccccaaacaggcgtaacgcctgcaaaacgggcaaagcctcagctcatgctgccgggctttgtccctttaccagttggcttaaattcaccggcacattgttttcaatagcggtgtataagctgtcgtaaacgccagcgattttttcgagatagtgttccagaacctgttcgcgatcgcggatgttgaccttgccatcaatcatgccgtcaatgctcagttgcgcctgcgcaatccgctgtttgtcttcgccatcttttgtttcgacgtaatactcgatggtgtggctgttaaagccatccgccagggtgacgtaaatgcgaaaatgttcaaaaaggacgaaacagagttctttgtccggcgcgcagctcatggcgtgatgcaggcgcgctttcgataacgtgatcccctgaaccagcgaattgcagtagatgtgccactggtcctgtaggcgacgatgccgctgtgcgatgtaatcggctttctcgcttatttcccaaatagtcattgtcaggttacccgtttaacagagatgccagctttaagcattttttgtgccaacttttaatttattgttattaaagagttttttaagctaaagatgaatttcgtcgccgtgtcgacgtgtcatttcgacatcatcgacattattcaccgcagggataatcaacactggcacaattattgcttgtagctggcaatagttaatgggaggcgatatgcacgaaataaccctctgccaacgggcactggaattgatcgaacagcaggccgcaaaacacggcgcaaaacgcgtaactggggtctggctcaaaattggcgcattttcttgtgtcgaaaccagctctcttgccttttgttttgatctggtttgccgcggcagcgtggcggaaggttgtaaactgcacctcgaagaacaagaggccgaatgctggtgtgaaacatgccaacagtatgtgacgctactgacccagcgcgtccgccgctgtccacagtgtcatggtgacatgctgcagattgtggcagacgacggtttacagattcggcggatagaaatagaccaggagtgagcgatgtgtacaacatgcggttgcggtgaaggcaacctgtatatcgagggtgatgaacataaccctcattccgcgtttcgtagcgcgccatttgccccggcggcacgcccgaagatgaaaatcaccggcattaaagcgcctgaatttacccccagccagactgaagaaggcgacctgcattacggtcatggcgaagcgggcactcacgcaccgggcatgagccagcgtcggatgctggaagtcgaaattgacgtgctggacaaaaataaccgtctggctgaacgcaaccgcgcgcgctttgctgcccgcaagcaactggtgctcaacctggtttccagccctggttccggtaaaaccaccctgctgacggaaaccctaatgcgcctgaaagacagcgttccgtgcgcagttattgaaggcgaccagcaaaccgtgaacgatgccgcacgcattcgcgctaccggcacaccagcgattcaggtgaacaccggtaaaggctgccatcttgacgcacagatgattgccgacgccgcaccgcgtctgccactggacgataacggtattctgtttatcgaaaacgttggcaacctcgtatgcccggccagcttcgatctcggtgaaaaacacaaagtggcggtgctttccgttaccgaaggtgaagacaaaccgctgaaatatccgcatatgtttgccgccgcctcgctgatgctgctcaacaaagttgacctgttgccgtatctcaactttgacgttgaaaagtgcatcgcctgcgcccgcgaagtcaatccagaaattgaaatcatccttatttccgccaccagcggcgaagggatggaccagtggctgaactggctggagacacagcgatgtgcataggcgttcccggccagatccgcaccattgacggcaaccaggcgaaagtcgacgtctgcggcattcagcgcgatgtcgatttaacgttagtcggcagctgcgatgaaaacggtcagccgcgcgtgggccagtgggtactggtacacgttggctttgccatgagcgtaattaatgaagccgaagcacgcgacactctcgacgccttacaaaacatgtttgacgttgagccggatgtcggcgcgctgttgtatggcgaggaaaaataatgcgttttgttgatgaatatcgcgcgccggaacaggtgatgcagttaattgagcatctgcgcgaacgtgcttcacatctctcttacaccgccgaacgccctctgcggattatggaagtgtgtggcggtcatacccacgctatctttaaattcggcctcgaccagttactgccggaaaacgttgagtttatccacggtccggggtgcccggtgtgcgtactgccgatgggtagaatcgacacctgcgtggagattgccagccatccggaagtcatcttctgtacctttggcgacgccatgcgcgtgccggggaaacagggatcgctgttgcaggcaaaagcacgcggtgccgatgtgcgcatcgtttactcgccgatggatgcgttgaaactggcgcaggagaatccaacccgcaaagtggtgttcttcggcttaggttttgaaaccactatgccgaccaccgctatcactctgcaacaggcgaaagcgcgtgatgtgcagaatttttacttcttctgccagcacattacgcttatcccgacgttgcgcagtttgctggaacagccggataacggtatcgatgcgttcctcgcgccgggtcacgtcagtatggttatcggcaccgacgcctataattttatcgccagcgattttcatcgtccgctggtggttgctggattcgaaccccttgatctactacaaggcgtggtcatgctggtgcagcagaaaatagcggcccacagcaaggtagagaatcagtatcgtcgagtggtaccggatgccggtaacctgctggcgcaacaggcgattgccgatgtgttctgtgtcaacggcgacagcgaatggcgcggcttaggcgtgattgaatcttctggcgtgcacctgacgccggattatcaacgattcgatgccgaagcacatttccgcccggcaccgcagcaggtctgcgatgacccgcgcgcgcgttgtggtgaggtattaacgggcaaatgtaagccgcatcaatgcccgctgtttggtaacacctgtaatcctcaaaccgcgtttggtgcgctgatggtttcctccgaaggagcgtgcgccgcgtggtatcagtatcgtcagcaggagagtgaagcgtgaataatatccaactcgcccacggtagcggcggccaggcgatgcagcaattaatcaacagcctgtttatggaagcctttgccaacccgtggctggcagagcaggaagatcaggcacgtcttgatctggcgcagctggtagcggaaggcgaccgtctggcgttctccaccgacagttacgttattgacccgctgttcttccctggcggtaatatcggcaagctggcgatttgcggcacagccaatgacgttgcggtcagtagcgctattccgcgctatctctcctgtggctttatcctcgaagaaggattgccgatggagacactgaaagccgtagtgaccagcatggcagaaaccgcccgcgcggcaggcattgccatcgttactggcgatactaaagtggtgcagcgcggcgcggtagataaactgtttatcaacaccgctggcatgggcgcaattccggcgaatattcactggggcgcacagacgctaaccgcaggcgatgtattgctggtgagcggtacactcggcgaccacggggcgactatccttaacctgcgtgagcagctggggctggatggcgaactggtcagcgactgcgcggtgctgacgccgcttattcagacgctgcgtgacattcccggcgtgaaagcgctgcgtgatgccacccgtggtggtgtaaacgcggtggttcatgagttcgcggcagcctgcggttgtggtattgaactttcagaagcggcactgcctgttaaacctgccgtgcgtggcgtttgcgaattgctgggactggacgccctgaactttgccaacgaaggcaaactagtaatagctgttgaacgcaacgcggcagagcaagtgctggcagcgttacattcccatccactggggaaagacgcggcgctgattggtgaagtggtggaacgtaaaggtgttcgtcttgccggtctgtatggcgtgaaacgaaccctcgatttaccacacgccgaaccgcttccgcgtatatgctaataaaattctaaatctcctatagttagtcaatgaccttttgcaccgctttgcggtgctttcctggaagaacaaaatgtcatatacaccgatgagtgatctcggacaacaagggttgttcgacatcactcggacactattgcagcagcccgatctggcctcgctgtgtgaggctctttcgcaactggtaaagcgttctgcgctcgccgacaacgcggctattgtgttgtggcaagcgcagactcaacgtgcgtcttattacgcgtcgcgtgaaaaagacacccccattaaatatgaagacgaaactgttctggcacacggtccggtacgcagcattttgtcgcgccctgatacgctgcattgcagttacgaagaattttgtgaaacctggccgcagctggacgcaggtgggctatacccaaaatttggtcactattgcctgatgccactggcggcggaagggcatatttttggtggctgtgaatttattcgttatgacgatcgcccctggagcgaaaaagagttcaatcgtctgcaaacatttacgcagatcgtttctgtcgtcaccgaacaaatccagagccgcgtcgttaacaatgtcgactatgagttgttatgccgggaacgcgataacttccgcatcctggtcgccatcaccaacgcggtgctttcccgcctggatatggacgaactggtcagcgaagtcgccaaagaaatccattactatttcgacattgacgatatcagtatcgtcttacgcagccaccgtaaaaacaaactcaacatctactccactcactatcttgataaacagcatcccgcccacgaacagagcgaagtcgatgaagccggaaccctcaccgaacgcgtgttcaaaagtaaagagatgctgctgatcaatctccacgagcgggacgatttagccccctatgaacgcatgttgttcgacacctggggcaaccagattcaaaccttgtgcctgttaccgctgatgtctggcgacaccatgctgggcgtgctgaaactggcgcaatgcgaagagaaagtgtttaccactaccaatctgaatttactgcgccagattgccgaacgtgtggcaatcgctgtcgataacgccctcgcctatcaggaaatccatcgtctgaaagaacggctggttgatgaaaacctcgccctgaccgagcagctcaacaatgttgatagtgaatttggcgagattattggccgcagcgaagccatgtacagcgtgcttaaacaagttgaaatggtggcgcaaagtgacagtaccgtgctgatcctcggtgaaactggcacgggtaaagagctgattgcccgtgcgatccataatctcagtgggcgtaataatcgccgcatggtcaaaatgaactgcgcggcgatgcctgccggattgctggaaagcgatctgtttggtcatgagcgtggggcttttaccggtgccagcgcccagcgtatcggtcgttttgaactggcggataaaagctccctgttcctcgacgaagtgggcgatatgccactggagttacagccgaagttgctgcgtgtattgcaggaacaggagtttgaacgtctcggcagcaacaaaatcattcagacggacgtgcgtctaatcgccgcgactaaccgcgatctgaaaaaaatggtcgccgaccgtgagttccgtagcgatctctattaccgcctgaacgtattcccgattcacctgccgccactacgcgagcgtccggaagatattccgctgctggcgaaagcctttaccttcaaaattgcccgtcgtctggggcgcaatatcgacagcattcctgccgagacgctgcgcaccttgagcaacatggagtggccgggtaacgtacgcgaactggaaaacgtcattgagcgcgcggtattgctaacacgcggtaacgtgctgcagctgtcattgccagatattgttttaccggaacctgaaacgccgcctgccgcaacggttgtcgccctggagggcgaagatgaatatcagttgattgtgcgcgtgctgaaagaaaccaacggcgtggttgccgggcctaaaggcgctgcgcaacgtctggggctgaaacgcacgaccctgctgtcacggatgaagcggctgggaattgataaatcggcattgatttaactgcaaattgccggacagatctgcctgtccggcatactattcatgaggttttttcggacgatatttttccggcagttctggcaccggacgcttgtcatcgatgagatgacgcacggttaagatcggatgacgccacagcattctcggcccggcccaacgcataatctgtttcatctcttcacgctttgcaggctggtaacagtgcaccggacactgcttacaggctggtttctcttcgccgaacacacatttatccagccgcttttgcgcgtaaacaaacaacgcctcgtaatgctccggctccgctgacgcctgcgggcatttcgcttgataaagatcgatcatttttttaatcgtcagtttttcacgagagatacgcttgccggacatgctgcctccacctcattaagatgtatttatattacatcttaatcttaaagggcactatgactccaaagaagaagggttagccaaccgatacaattttgcgtacttgcttcataagcatcacgcaaaagctgcaaaacagcatctttcccggaaccagcatcaagaactcgccgttcgcttcttcccctgaaatgattaactccggtatcatgtgcgccttatgtgattacaacgaaaataaaaaccatcacaccccatttaatatcagggaaccggacataaccccatgagtgcaatagaaaatttcgacgcccatacgcccatgatgcagcagtatctcaggctgaaagcccagcatcccgagatcctgctgttttaccggatgggtgatttttatgaactgttttatgacgacgcaaaacgcgcgtcgcaactgctggatatttcactgaccaaacgcggtgcttcggcgggagagccgatcccgatggcggggattccctaccatgcggtggaaaactatctcgccaaactggtgaatcagggagagtccgttgccatctgcgaacaaattggcgatccggcgaccagcaaaggtccggttgagcgcaaagttgtgcgtatcgttacgccaggcaccatcagcgatgaagccctgttgcaggagcgtcaggacaacctgctggcggctatctggcaggacagcaaaggtttcggctacgcgacgctggatatcagttccgggcgttttcgcctgagcgaaccggctgaccgcgaaacgatggcggcagaactgcaacgcactaatcctgcggaactgctgtatgcagaagattttgctgaaatgtcgttaattgaaggccgtcgcggcctgcgccgtcgcccgctgtgggagtttgaaatcgacaccgcgcgccagcagttgaatctgcaatttgggacccgcgatctggtcggttttggcgtcgagaacgcgccgcgcggactttgtgctgccggttgtctgttgcagtatgcgaaagatacccaacgtacgactctgccgcatattcgttccatcaccatggaacgtgagcaggacagcatcattatggatgccgcgacgcgtcgtaatctggaaatcacccagaacctggcgggtggtgcggaaaatacgctggcttctgtgctcgactgcaccgtcacgccgatgggcagccgtatgctgaaacgctggctgcatatgccagtgcgcgatacccgcgtgttgcttgagcgccagcaaactattggcgcattgcaggatttcaccgccgggctacagccggtactgcgtcaggtcggcgacctggagcgtattctggcacgtctggctttacgaactgctcgcccacgcgatctggcccgtatgcgccacgctttccagcaactgccggagctgcgtgcgcagttagaaactgtcgatagtgcaccggtacaggcgctacgtgagaagatgggcgagtttgccgagctgcgcgatctgctggagcgagcaatcatcgacacaccgccggtgctggtacgcgacggtggtgttatcgcatcgggctataacgaagagctggatgagtggcgcgcgctggctgacggcgcgaccgattatctggagcgtctggaagtccgcgagcgtgaacgtaccggcctggacacgctgaaagttggctttaatgcggtgcacggctactacattcaaatcagccgtgggcaaagccatctggcacccatcaactacatgcgtcgccagacgctgaaaaacgccgagcgctacatcattccagagctaaaagagtacgaagataaagttctcacctcaaaaggcaaagcactggcactggaaaaacagctttatgaagagctgttcgacctgctgttgccgcatctggaagcgttgcaacagagcgcgagcgcgctggcggaactcgacgtgctggttaacctggcggaacgggcctataccctgaactacacctgcccgaccttcattgataaaccgggcattcgcattaccgaaggtcgccatccggtagttgaacaagtactgaatgagccatttatcgccaacccgctgaatctgtcgccgcagcgccgcatgttgatcatcaccggtccgaacatgggcggtaaaagtacctatatgcgccagaccgcactgattgcgctgatggcctacatcggcagctatgtaccggcacaaaaagtcgagattggacctatcgatcgcatctttacccgcgtaggcgcggcagatgacctggcgtccgggcgctcaacctttatggtggagatgactgaaaccgccaatattttacataacgccaccgaatacagtctggtgttaatggatgagatcgggcgtggaacgtccacctacgatggtctgtcgctggcgtgggcgtgcgcggaaaatctggcgaataagattaaggcattgacgttatttgctacccactatttcgagctgacccagttaccggagaaaatggaaggcgtcgctaacgtgcatctcgatgcactggagcacggcgacaccattgcctttatgcacagcgtgcaggatggcgcggcgagcaaaagctacggcctggcggttgcagctctggcaggcgtgccaaaagaggttattaagcgcgcacggcaaaagctgcgtgagctggaaagcatttcgccgaacgccgccgctacgcaagtggatggtacgcaaatgtctttgctgtcagtaccagaagaaacttcgcctgcggtcgaagctctggaaaatcttgatccggattcactcaccccgcgtcaggcgctggagtggatttatcgcttgaagagcctggtgtaataacaattcccgatagtcttttgctatcgggaatattaacgacaactgacgaataaaataaaaacaccctgtataataggaaagcttattttacagggtaaaaccatgccatctacacgctatcaaaaaatcaatacccatcactatcgccatatatgggtcgttggtgatattcatggtgaatatcagttattacaatcccgcttacatcaactctcttttttccccgaaatcgacttacttatttctgtcggcgataatattgatcgtggaccggagagtcttgacgtcctgcgcctgctaaaccaaccctggtttacgtcggttaaaggcaaccacgaagcgatggcgcttgaggcattcgaaactggcgatggcaatatgtggcttgccagcggtggtgactggtttttcgatttaaatgattcagagcaacaagaggcaatagatctgttgctgaaattccatcaccttccacatattattgaaatcactaacgacaacataaaatatgccatcgcacatgcagattatccggggagtgaatatctctttggtaaagaaatagcggagagcgaattactctggcctgttgatcgtgtgcagaaatcgcttaatggcgagttacaacaaataaacggcgctgattattttatatttggacatatgatgtttgataacattcagacgttcgctaaccagatttatattgataccggatcgccgaacagcgggcggctgtcattttataaaataaagtagtctcatgcttcttctgtgaagcatgagtaacccggtgttattgcaggccattattcatttttcgctaccagcaaagagagatcctgcttcaccagcgcgcgactggcactctccggcaaaccgtcgtctgtaataatctgatcaaactcgcttaatggtaacgccagccatgtcgccacctgaccatatttcgtcgcatcacagaccaaaactcgctggcggctggcactggcaatcgcccgtttcaccgtgactttatcttccgctggcgtagaaatcccccgcacactccatgacgatgcagaaataaaagcctgatcaatcatcaggctgcgcagcatggtcgcagcggcttccccgacacaggaacggttttcccgacacactgcaccgccagtgtgaataattgtgcaattactgttgtcgagcaagtagtccgcaataacgaaatcgtttgtgaccacagtcagtgactccatgtgaatcagatgctgtgctatcgctaacgtggtcgttcccgcatccagatagatacaacttcccggctgaacaagacttgccgccagcttgccaatagccgctttttgcgtcattgccagcgcagtttttacctgatgagaaggttcatgcgccacgcgtcccggagactggacgcctccggacaccagcacaacggctccctgctgctccagtttttgtaaatcccgacgaatggtcatatgtgacacattcattctgtccgttagttcagcaatactgacaatgcctttttcagctaccatctcaaggatgatttggcgacgctctacgggtatcaacttttgctccttcctttgtcctgctgacattctacgctatttgcctgcgaaacgtgcgcggcgcaactaacgcttagttcacataaaataacacacaatgttaatttatgtgaatcagatcaccatatcgttatcttccagcgcttatattcacaatatcaaacaaaatatcacttaaattaacaaggagagcagatgaaaacgggatctgagtttcatgtcggtatcgttggcttagggtcaatgggaatgggagcagcactgtcatgtgtccgcgcaggtctttctacctggggcgcagacctgaacagcaatgcctgcgctacgttgaaagaggcaggtgcttgcggggtttctgataacgccgcgacgtttgccgaaaaactggacgcactgctggtgctggtggtcaatgcggcccaggttaaacaggtgctgtttggtgaaacaggcgttgcacaacatctgaaacccggtacggcagtaatggtttcttccactatcgctagtgctgatgcgcaagaaattgctaccgctctggctggattcgatctggaaatgctggatgcgccagtttctggtggtgcagtaaaagccgctaacggtgaaatgactatcatggcctccggtagcgatattgcctttgaacgactggcacccgtgctggaagccgttgccggaaaagtttatcgcataggtgcagaaccgggactaggttcgaccgtaaaaattattcaccagttgttagcgggcgtacatattgctgccggagccgaagcgatggcacttgcagcccgtgcggggatcccgctggatgtgatgtatgacgtcgtgaccaatgccgccggaaattcctggatgttcgaaaaccggatgcgtcatgtggtggatggcgattacaccccgcattcagccgtcgatatttttgttaaggatcttggtctggttgccgatacagccaaagccctgcacttcccgctgccattggcctcaacagcattgaatatgttcaccagcgccagtaacgcgggttacgggaaagaagacgatagcgcagttatcaagattttctctggcatcactctaccgggagcgaaatcatgatcaagattggcgttatcgccgatgattttaccggcgcgacggatatcgccagttttctggtggaaaacggtctaccaacggtacaaattaacggtgttccaacaggtaaaatgccggaagcaatcgacgcactggtgatcagcctgaaaacgcgctcctgtccagtggttgaagccacacagcaatcgctggcggctctgagctggttgcaacagcaaggttgcaaacagatctatttcaaatactgctctactttcgacagtacggcgaaaggtaatattggcccggttaccgatgccttaatggatgctctcgacacgccgtttacggtcttctctccggccctgccggtcaacggacgtacggtttatcaggggtatttgttcgtaatgaatcaactgctggccgaatccgggatgcgccatcacccggtaaatcccatgaccgacagctatcttccccgtctggttgaagcgcaatccacagggcgctgcggcgtcgtttcggcacatgttttcgaacaaggtgtggatgccgttcgtcaagagctggctcgcttacagcaagagggctaccgctacgcggtgcttgatgcgctgaccgaacaccatctggaaattcagggagaagccttgcgcgatgccccactggtaacgggcggttctggtctggcgattggcctggcccggcagtgggcgcaagaaaacggtaaccaggctcgcaaagcagggcgtccgctcgctgggcgcggcgtagtgctctccggttcatgctctcaaatgaccaaccgccaggtagcacattaccgtcaaattgcaccagcccgtgaagttgatgtggcacgctgcctctcaattgaaactctggccgcttatgcacacgaactggcagagtgggttctgggccaggaaagtgtacttgctccactggtttttgccaccgccagcactgacgcattggcagcaattcaacagcaatacggtgcacaaaaagccagtcaggcagtagaaacactgttttctcaactagcggcgcggttagcagcggaaggcgtgacacgctttattgtcgcaggcggtgagacctccggcgtagtcacacagagcctgggaataaaagggtttcatattggcccaaccatttcccccggcgtgccgtgggtaaacgcactggataagcctgtctcactcgcccttaaatctggcaacttcggtgatgacgcctttttttcacgagcccaaagagagtttttatcatgagcgatttcgcaaaagtagagcagtctttgcgagaggagatgacgcggattgccagttcattctttcagcgcggctatgcaaccggttcggctggcaatctgtcgctgcttttacctgacgggaatttactggcgacaccgacaggttcatgcctgggcaatctcgatccgcagcggctttccaaagtcgccgcggatggcgaatggttaagtggtgacaaaccctcgaaagaggtgctctttcatctggcgctgtatcgcaacaatccgcgttgtaaagcggtggtgcatttgcacagcacatggtcgacggcgctttcctgcctgcaagggctggacagcagcaacgttattcgtccgttcacaccatacgtggtgatgcggatgggaaatgtcccgctggtgccttattaccgaccgggcgataaacgcatcgcacaggatctggcggaactggcagcagacaatcaggcttttttactggcaaatcatggcccagtggtttgcggtgaaagcctgcaagaagccgccaacaatatggaagagctggaggaaacggcaaagctgatttttattctcggtgaccgcccgatccgttatctgaccgcaggtgaaattgcggaattaaggagttaatgcaatgcctcgttttgcagctaatttatccatgatgttcaccgaagtgccttttattgaacgcttcgccgcagcgcgaaaagccgggttcgatgctgtggaatttctgtttccctatgactactccaccctgcaaatccaaaagcaactggagcaaaaccatctgacactggcgctgttcaataccgctcccggagatattaatgcgggggaatggggattatccgcccttcccggacgtgagcacgaagcacacgcagacatcgacctggcactggaatatgcattggcgctcaattgtgaacaagtccatgtgatggcaggcgtcgtgcccgctggcgaagatgctgaacggtaccgggcagtatttatcgataatctccgctacgctgccgaccgctttgcgccacacggcaagcgaatattagttgaagcactcagccccggcgttaagcctcattatctcttctccagccagtatcaggcactggctattgttgaagaagttgcgcgagataacgtgtttattcaactagatacttttcatgcgcaaaaagtagatggcaacctgacgcatttaatccgcgactacgccgggaaatatgcgcacgtacaaattgccggactacctgatcgacatgaaccggacgatggagaaatcaactatccgtggctgttccgcctgttcgatgaggtgggatatcagggctggatcggttgtgaatataaacctcgtggcctcaccgaagaagggcttggctggtttgacgcctggcgctaattcgttaaatccctaattacaacgtacccatacatccccccatctacggatggggtaggttaactataactttcagacagggtttcccatgtccacaattacattgttatgcattgcgttaactggcgtaatcatgctgttgctgctggtcatcaaggcaaaggtacaaccattcgttgctctgctcctcgtcagcctgttagtcgcacttgcggcgggtataccggcgggcgaagtgggtaaagtgatgatcgccgggatgggcggtgtgcttggttccgtcactattattattggtctgggcgctatgctggggcgtatgatcgaacactctggtggtgcagagtcactggctaattatttcagtcgcaagttaggtgacaaacgaactatcgctgcgctgactctggcagcgttcttcctcggtattcccgtcttctttgatgtcggctttattattcttgcgccaatcatttacggttttgccaaggttgccaaaatatcgccactcaaatttggcctgcctgtcgctgggatcatgctcactgttcacgtggcggtaccgccgcatccaggccctgtcgccgcagcggggttactccacgcagacatcggctggctaaccatcatcggtattgcgatttctattcccgtaggggttgttggctactttgcagcgaaaataatcaataagcgccaatatgcgatgtcagtagaagtactggaacagatgcaactggctccggccagtgaggaaggcgcgacaaaattaagcgataaaataaatccaccgggcgtcgcgctggtcacctcgctaattgttattcctatcgcgattatcatggcgggtacggtttccgcaacactgatgccgccttcgcatcccctgcttggtacgctacagctgatcggctcaccaatggtagctctaatgattgcgctggtgctggcattctggttattggctttacgtcgcggctggagcttacaacacaccagcgacattatgggctcagcgcttcctactgcggcggtagtgattttggttactggtgctggaggggtatttggcaaagtgctggtggaatcgggcgtcggcaaagcccttgccaacatgctacaaatgattgacctgcctctgttaccagccgcatttattatttcactggcgctgcgtgcatcgcaggggtcagcaaccgtagcaatactgacaaccggcgggttactctcagaagcggtgatgggattgaatccgattcagtgcgtattggtgacgctggcagcctgctttggtgggcttggtgcgtcacatattaatgactcagggttctggattgtgaccaaatatctggggttatcggtagcagacggtctgaaaacctggacagtgttaacgaccattctcggttttaccggattcttaattacctggtgcgtatgggcggtaatttgaccttaataaaaaggtccgatgggcatcggaccttttattgtgcacagaaaaggccagcctcgcttgagactggcctttctgacagatgcttacttactcgcggaacagcgcttcgatattcagcccctgcgtttgcaggatttcacgcaaacggcgcaggccttcaacctgaatctggcgaacacgttcacgggtgaggccaatttcacgacctacatcttccagtgttgccgcttcgtaccccagcaaaccgaatcgacgtgccagcacttcacgctgtttggcgttcagctcgaacagccatttgacgatgctctgcttcatatcgtcatcttgcgtggtatcttccggaccgttctctttttcatcggccaggatgtccagcaacgctttttcggaatcaccacccagcggggtgtctaccgaggtaatgcgctcgttaagacgaagcatacggctgacgtcatcaactggcttatccagttgctctgcgatctcttccgcacttggttcatggtccagcttatgggacaactcacgtgcggttcgcaggtaaacgttcagctcctttacgatgtgaatcggcaaacgaatagtacgggtttggttcataatcgcccgttcaatcgtctggcgaatccaccaggttgcgtatgttgagaagcggaaaccacgttccgggtcaaacttctctaccgcgcggatcagccccaggttgccctcttcgataaggtccagcaacgccagaccacgattgccataacggcgggcaatttttaccaccagacgcaagttactctcgatcatccggcggcgagaggcgacatctccacgcagtgcgcgacgcgcaaaataaacttcttcttcggccgttaacagtggtgaataaccaatctcaccaaggtaaagctgagtcgcgtccaacacacgctgtgtggctccctgcgataacagttcctcttcggccaaatcgttatcactgggttcctcttctactaaggccttttcgtcaaaaacctcaactccgttctcatcaaattccgcatcttcatttaaatcatgaactttcagcgtattctgactcataaggtggctcctacccgtgatcccttgacggaacattcaagcaaaagcctggttccgccgatttatcgctgcggcaaataacgcagcgggtttacggatttccccttgtaacgaatttcaaaatgcaagcgtgttgaactggttccggtgctacccatggttgctattttttgccccgccttcacttcttgttgttcccggaccagcattgtgtcgttatgggcgtaggcactcaggtaatcatcattatgtttgatgataatcagattaccgtagccgcgcagcgcgttaccagcataaacaacgcggccatctgcggtcgcgataattgcctgtcctttgctgcctgcgatatcaatccccttgttgcccccctcagaagcgccaaaggtttcgatcactttgccctcagtcggccagcgccaggtggagataggcgtactggttgatgtactgctgacagttggctcggttgtgcttgctgttggtaccgttacaggcgctgtgaccgtggtcgcagctggcttgttgttcggcaacattttgttagcactctgttcacccgaagattcagaatacgtaattgtcggttgcgacgcaacagcaacggtggaattttgtgcaggcttgatcacaactccttgctctgctgcgtcggcctgggtaatggcatttccgccagtgattggcgtaccggaagcattacccacctgcaaggtctgaccaacgttcagcgcgtatggtgcctgaatattgttgcgctgagcaaggtcacggaaatcgttgccagtaatccaggcgatatagaaaagtgtgtcgccttttttcacggtataggtactgccgctataactgcctttcggaatgttcccatactgacggttatagacgatgcgtccgttttccatctgtaccggctgctgagctactggctgcactggctggatttgcggttgttgagtagcctgaatttgtggctgctgtaccggctgaatttgcggttgctgcgctgtagacgtcgtccccattttcggcggcggcgtaatcaacataccagaattagtatttgcaggcgcattgccattaacggagctgaccggtgccggtggatttgaagtgtcagaacagcctgccagccatagcgaaaccagtgacaaagccgcaatgcggcgaacggtgaattttgggcttcccgcgctcatttatcccccaggaaaaattggttaataaccagtgacataattaccgtgcaaggcaccctactgaacactggaaaagatgttcacgatacgctgacctgcggcaaaataaccaggaaaaatccaggtatttcctcacgttttaagccagctcacccttcactaaagggacaaagcgcacggcctccacggtatcgataataaattcgcctccccgacgacgcacccgtttcaaatactggtgctcctcccctacgggtaagacgagaatcccgccttcgtccagctgcgtcattagcgcagttggaatttccggcggtgccgccgtaacaatgatagcgtcaaacggcgcacgtgcctgccaaccttgccatccatcgccatgacgggttgaaacattatgtaaatcaagatttttcaggcggcgacgtgcctgccactgcaagcctttaatccgttcaaccgagcaaacatgctggacaagatgcgccaggattgccgtttgatatcccgaaccggtgccaatttccagcacccgcgactgcggcgtcagctcgagtaattcggtcattcgcgccaccatatatggctgcgaaattgtctgcccctgacctatcggcaaggcgatattgtcccaggctttttgttcaaacgcttcatcaacgaatttttcacgcggcacggcggcaagtgcattcagcacctgctcatcctgaataccttgcgcacgtaattgatccagaagtgcttgtacgcgtctgcttaccattgcgtgccaactcccacgctgtttaaccagtctgaaaccacatcttgcgcgctatgcgcagttaaatccacatgcagcggcgtgatggagacatagccctcatctaccgcagcaaaatcggtccccggaccggcatcacatttaccgcccggcgggccaatccagtacagcgtattgccgcgcggatcttgctgcgggatcacctgatctgccggatgtcgtgtaccgcagcgcgtcacgcgaatacctttgatttgatccaagggtaaatccggaacgttaatattaagaatacgcccggtgcgcagcggctctttacacagtgcgcgcaaaattgaacaggttaccgccgcggcagtgtcgtaatgtttatgcccgtcaagcgagacggcaagcgccggaaaacctaaatgacggccttccatcgcggcggctaccgtaccggaataaataacatcatcccccagattcggcccggcgttaattccggacacaacaatgtccgggcgcggacgcatcagagcattcacgccaagatagacgcaatcggtcggggttcccatttgcacagcaatatcaccattttcaaaggtaaacgtgcgcagggaggattccagtgtcagagaatttgaagcgccgctgcggttacgatcgggggcgaccacctgaacgtcagcaaactcacgcaaggctttcgccagcgtttgtataccgggtgcatgtaccccgtcatcattactcagcaatatgcgcataatcacctgttgtgttgataagttccctgacaacgctggttgcaaaactacccgccggaagccagaaacggatctctacggtgacgtcatcccaccaattccagcttaattgttgcggatacagcagcatcgctctgcgcgcggcttcaactttttcgcgcaccagtaaagcttgtaattcagtttctgcggcgacagctgcttgttcgaatgccagcgcttcacgctgagttccccattcgccactgcccggcaatgcggcggttatcatcagctctttatcgttaacgcgacgctgtaattccgccagttcttcggtggttgcgacaaaccagctaccacgtccggctaattgtagcgcatcgccgtcaacaacttgattaacgtctgcttttttgaggcgctcagcaacaatctgattaaacaacgcactgcgggctgccgacaaccaaaaactccgtttattgcgatcgcgcaccggagtattggtttgcgcccagcgctgcgccccctgcaagttgctaccgccaatcccaaaacgttgggcaccgaagtagttcggtacaccttttacgcaaatatcgttcagacgttgttcaacgtcatcgcgattgctcacttcgcgcagaaccagggtaaaggcgtttcctttcagcgcccctaaacgcagcttgcgcttgtgccgcgcatactccagcacctggcagccttccagttgaaaggcgctcagatcgggcatttccttgcccggcacgcgagcgcataaccactgttccgtaacagcatgtttgtctttttgcccagcgaagctgacttcacgggcatgaattttcaggaatttcgccagtgcatccgccacaaaacgggtattgcagccgtttttgaggattctaaccagaatatgctcaccttcaccatcaggctcaaagcccaaatcttccaccaccacaaagtcttccggattggctttcagcagcccggtgccttgcggtttaccgtggaggtaagtgagattatcaaactcaatcattttgttgccttaatgagtagcgccaccgcttcacaggcaatcccttccccacgtccggtaaatcccagtttttccgtagtagtggctttcacgttaacatcatccatatggcagccgagatcttcggcaataaacacgcgcatttgtggaatgtgcggcaacatcttcggtgcctgagcgatgatagtgacatcgacgttgccaagggtataacccttcgcctgaatacgacgccaggcttcgcgtagcagctcgcggctatcggcacctttaaatgccggatcggtatccgggaacagcttgccgatatcccccagcgccgccgcgccaagcaatgcatcggtcaacgcatggagcgccacgtcgccatcagaatgcgccagcaatcctttttcgtaaggaatgcgtacgccaccaatgataattgggccttcaccgccaaaggcatgtacgtcaaaaccgtgtccaattcgcattatgtattctcctgatggatggttcgggtgaggtaaaactcggccagtgccaaatcttccgggcgcgtgactttaatgttatccgcacggccttcgaccaactgaggatggaatccgcaatattccagcgccgaggcttcgtcggtaatagtcgcgccttcatttagagcgcgcgtcagacagtcatgtaacagctcacgagggaaaaattgcggcgtcagcgcgtgccataagccgttgcgatcaacggtatgagcaatggcatttttgcccggttcggcacgtttcatagtatcgcgcactggtgcggcgaggatcccccccgtgcggctggtttcgctcaacgccaacaatcgcgcgaggtcatcctgatgcaaacaaggacgagcggcgtcatgcaccaatacccactgcgcgtcgccagcggctttcagacctgccagcacggaatcggcacgctcatcaccgccatctacaacggtgatttgcggatgattcgccagaggaagttgtgcaaaacggctatcgccaggacttatggcaatgacgactcgtttcacccggggatgcgccagcagcgcatgcaccgagtgttcaagaatggtttgattaccgattgagagatattgcttaggacattccgtttgcattcgacggccaaatccggccgccggaaccacggcgcaaacatccaaatgagtggttgccatgttaattcccgggctgatttatcgattgttttgccccgcagactgtgcgcgcttcgacgcgtcaggcaccagacgataaaaagtttcgcccggcctggtcatgctgagttcattacgcgcacgctcttcgagcgcctcctggccgccattgagatcgtcaatttcggcaaaaagttgatcgtttcgcgctttaagtttcgcgtttgtagcttgctgtgccgccacatcatcattgacgcgggtatagtcatgtataccgttcttaccgaaccacagcgaatactgtagccagaccagaatagccagcaacagcagcgttagtttacccatcctgccccctgaaaaacggcatcatcatcccatgcatccgaagacgactctacatcctctgttggggataccgcgacaacgcgggcaaatgtaccacatttgtccattgttacgtatacccagggcgtgcagaacataatctcattattagttacggtttgaattatgaacagaggagacgggaaagtacaaattagcccagtagccacataaacagtgcgccaaacataatgcctactgtcaccagggtgaaaacaatactgtagcgtagctttccgtccatcaatgaatgcagcgcaatccccaccactaccgcgacgggcatcagcgcaagaaagaaaggccaggtgtagataaagaagaacagcgtgttagagccataaatcaacatcggcatcgccagcgcaaataaccaggagataaaaccgaccacggcaccaggcagtgaccatgtggtttcttcatcctcagtaaggctgtcgttatttgttagtgtaatgttatggctattacgcatatttgatcctgttactttgacgaaccgggcatggaaacccggtggtgtctcaggatctgataatatcgttctgtctcaacagatctaataattgctgtaccaaatttgttactaattgttcaccattgagatgaatttctgccgattcaggcgcttcgtaaacggaatctattcccgtaaagtagcgcagttcaccggcacgcgctttcttatataagccttttggatcgcgggcttcgcaaatcgccagcggcgtatcgacaaacacttcgataaagcgcccttctcctacgcgttcacgaaccatctggcgttcggcgcggtgtggcgagataaatgcggtcagcaccaccagtccggcttcaaccatcaaattcgccacttcaccgacgcgacggatattctctttacgatcggcatcgctaaaaccgagatcgctgcataatccgtggcgaacattatcgccatccagcagatacgtactgacgccgagtttatgtaacgcctcctccagcgccccggcgaccgttgatttaccggacccggagaggccggtaaaccacagcactacaccacgatgaccgtggtgtagctcgcgttgttgcacagtgaccggatggctatgccagacgacgttttcgtcatgcagcgccattatttatcccccagcaaatcgcgcgcgccccagtgtggaaagtggcggcgaaccagggcattcaattccagttcgaatgcactaaattcagatggcgcagcagttgcctggctaactggctcatgcaccataccggcacctacggtcacattgctcaggcgatcgataaaaatcagcccaccggtaaccgggttttgctgataacgatctaacaccagtggctcgtcaaaagtgagatccaccaggccgatgccgttcagcggcaggttttcaacttcgcgttgggtaaggttattaatatcaacctgataacgaatgccatcaacacgagcacgcgtcttcttaccggcaattttgatgtcataactctggcccggggaaagcggctgttccgccatccataccacatccaccgacgcgctctgcacagctggtaacgcttcgtctgccgccagcagcagatcgccacggctgatgtcgatctcatccgtcagcaccagggtgatcgcttctccggcaaaggcttcttcgcgatcgccatcaaaagtcacgatccgggcgacgtttgattccacaccagagggcagcactttgactcgttgcccgacttctacgcgaccggatgccagcgttccggcgtaaccacgaaaatcgagattcgggcgattaacgtactgcaccgggaagcgcattggctgagcatccaccactcgctggatctccacggtttccagcacttcgagcagtgttggaccgctgtaccacgccatactttcactttgcgaagccacgttgtcgccttccagtgcagagagcggcacaaagcggatatccagattacccggcagctgcccggcaaaggtcagataatcttcacgaatacgggtgaacgtcttttcactgtaatccaccagatccattttgttgatcgccacgaccagatgtttgatccccaacagtgtggagataaaactgtgacgacgggtttgatcgagcacgcctttacgggcatcgatcagtaagatcgccagttcacatgtcgatgcgccagtcgccatattgcgggtgtactgctcgtgccctggggtgtcggcgataataaatttacgcttctcggtagagaaatagcggtaagccacgtcaatggtgatgccctgttcgcgctcagcttgcaggccgtccaccagcagtgccagctccagcttttcgccctgggtgccgtgacgtttactgtcgttatgcagcgatgagagctgatcttcgtagatttggcgggtatcgtgcagcaggcgaccaatcagggtacttttgccgtcatcgacgctaccacaggtcagaaaacgcagcaggcttttatgttgttgcgcaatcatccaggcttcgacgccgccttcattggcgatttgttgtgcaagtgcggtgttcatcttaaaaatacccctgacgttttttcagctccatagaccccgcctggtcgcggtcaatcacgcggccctgacgttcactggtggtagaaaccagcatctcttcgatgatctccggtagtgtttgtgcatttgactccaccgcaccggtcagcggccagcagcccagcgtacggaaacgcaccatccgttttttaatcacttcgcccggttgcaggtcgatacggttgtcatcaatcatcatcaacataccgtcgcgttccagaaccggacgttccgcagcgagatacagcggcacaatgtcgatattttccagccagatgtattgccagatatcctgctcggtccagttagagagcgggaagacgcggatgctttcgcctttgttaatttgcccgttgtagttgtgccacagctctgggcgctgatttttcggatcccagcgatggaagcggtcacggaaagagtagattcgctctttagcgcgggatttctcttcgtcacggcgcgcaccaccgaaggcggcatcaaaaccgtatttgttcagcgcctgtttcaggccttcagttttcataatatcggtatgtttcgcgctgccgtgcacgaatggattaatccccatcgccacgccttccgggtttttatgcaccagcagctcgcagccgtaggctttcgccgtacgatcgcggaactcatacatctcgcggaatttccagccggtatcgacatgcagcaacgggaaaggcagcgtacctggataaaacgccttgcgcgccagatgcagcatgacgctggaatctttaccgatagagtagagcatcaccggatttgagaattctgccgccacctcgcgaataatgtggatgctttccgcctccagttgccgcaggtgagtaagtcgtatttgatccataaccgttcctttgcaataccgctattttcttgccatcagatgtttcgactatagggagcgtaagagaacgaatgaaattaccaattagaatgagtagttccttaacggaataacgatttggcaaagctaatatcaaaaagtgcttaaggcaccggatttcgggcgtttaggaagatttgaaattgttttagcgcagcggcagtttcatactatggcggtaaaaaaatttgcatggtatttaaggactcactatgttttccgcattgcgccaccgtaccgctgccctagcgctcggcgtatgctttattctccccgtacacgcctcgtcacctaaacctggcgattttgctaatacccaggcacgacatattgctactttctttccgggacgcatgaccggaactccagcagaaatgttatctgccgattatattcgccaacagtttcagcaaatgggttatcgcagtgatattcggacatttaatagtcggtatatttataccgcccgcgataatcgcaagaactggcataacgtgacaggaagtacggtgattgccgctcatgaaggcaaagcgccgcagcagatcatcattatggcgcatctggatacttacgccccgctgagcgatgctgacgccgatgccaatctcggcgggctgacgttacaaggaatggatgataacgccgcaggtttaggtgtcatgctggaattggcagaacgcctgaaaaatacgcctaccgagtatggtattcgatttgtggcgaccagcggcgaagaggaagggaaattaggcgctgagaatttactcaagcggatgagtgacaccgaaaagaaaaatacgctgctggtgattaatctcgataacttaattgttggcgataaattgtatttcaacagcggtgtaaaaacccctgaagcagtaaggaaattaacgcgcgacagggcgctggcaattgcgcgcagtcacggaatagccgcaacgaccaatccgggtttgaataaaaattatccgaaaggcactgggtgttgtaatgacgcagaaatattcgacaaagcgggcattgctgtactttcggtggaagcgactaactggaatcttgggaataaggatggttatcagcaacgcgcaaaaacagccgcattccctgcgggaaatagctggcatgacgtaagactggataatcaacagcatattgataaggcacttcctggaagaatagaacgtcgctgccgtgacgttatgcggataatgctaccgttggtgaaggagctggcgaaggcgtcttgatgggtttgaaaatgggagctgggagttctaccgcaggggcgggggaactccaagtgatatccatcatcgcatccagtgcgcccggtttatccccgctgacgcggggaacacacatgaatgtcggttcagaccgtgtttttacccggtttatccccgctggcgcggggaacacagtgctggaccatttcaaattcacaatagattcggtttatccccgctggcgcggggaacacggaatgatatttcaataaataattataacaatcggtttatccccgctggcgcggggaacacagccgggcgaaattttgattcatcgtgatgaccggtttatccccgctggcgcggggaacaccctgaacggtggggaaaaaccccataagcgctaacttaagggttgaaccatctgaagaatgcgacgcctcggtgcctcgttaagacgatgcctcgcgttcttcaattgcgtttttgtaggctgtcagggatactgtcccacgaatggccacctgtaagctccagatgaccattttttgttattctccacaacgagttagttcttcttttcggatccggcacttctgggggggaaatccagcgatggctggattatgtcgtcaattaaaaatgcggcgagtagattagcaaatatccacgctttcgcgagttcaggttcctttgcacgcaaagcatccaggtgcagcaaacttttgagccgcttaaaagccagttcaatttgccatcgcagacggtaacaatcagccacttgctctgctgaatattcatcttccggtaatgatgttagcaatagcacatggcccgctgcttccagcgtttccgcctgaactactcgtccttttcgacgattctcgctgagcagtcgggttttactgattaatgctttttcgggaggaagtgatacggcaatgagacgtgccggaaagggagctccggcttttttattacctgaattgcctatcattacagtggtttcaccgttcttaccgcaatccagcccgcgcagaaaacccatcatgtcaaagcgcattccttctgcagttaaccagcgcaatcctcgccagtgaacccggacgatataatcagcttctccaaaagcaagtgagcggatacattcgggacgcgaaccgaatccccggtcagcaatgcgtatctcgtctgccgtttgcgcaaatcggtccagccgttcagcgtctctgctgtcggttagctcaaaatcagtgaactgacaggtatgaggatcatatcccatatgtagtcgccattcagcgctgccgcccccgggcgcactgattgctgttccatcgacaagacgcaatctctttccgcttgtacaacccgtaactgcggcgcgtacagcaagtgtttgtgcggcaagtatgccaaaccagtcggcggcattccgcagccgcttcaggaaagccacgtcagataatgttgcaacgtcatggagctgagcccatgcagtgacttcacgtaatgacatccccccggggccgtaagccagccccagacgtagcagagttgcagcatcacgaatttcgcggcggcgggttagagccccggcattacgtgccgaagtatccagttcttcgggcttaccaatatgggccagaattgctgaccagttatcgtgagagtaattcatcggcacgttaaatcatatcaggcgtaataccacaacccttaagttagcgcttatgggaaaaaccccctcttaactcggtttatccccgctggcgcggggaacactttttgttaattgcgtttgccacggtttgcaacggtttatccccgctggcgcggggaacactgagcgtcggcggctcgctggatttgcgcggcggtttatccccgctggcgcggggaacacaatgcatcagttgaacacaaaagtagcttttccggtttatccccgctggcgcggggaacacttttgctgacaccggcaatactgaacggctggcggtttatccccgctggcgcggggaacactacgtggagaatatttgcaacacccgcaagaacggtttatccccgctggcgcggggaacactcactgagcctcgcccctatgtgatgcaaattcggtttatccccgctggcgcggggaacacgccgccatgtcaggaacaccagagccgcccgacggtttatccccgctggcgcggggaacacattttgatttgcacctaatccgaccgcctggccggtttatccccgctggcgcggggaacacttagttgtaactctgtgaatctcgggatcgtccggtttatccccgctggcgcggggaacacaaaacccagcttgtactgaaaatgatagacgtcggtttatccccgctggcgcggggaacacgagtcgacgtttatcaatatcagttgcaccggcggtttatccccgctggcgcggggaacacgggattatcaacgaggtcaaataatttactgccggtttatccccgctggcgcggggaacacatgatgaattttttcaggacgaagtttttcgacggtttatccccgctggcgcggggaacacataatcgcccaggcgcgaaacgcctcgaacgacggtttatccccgctggcgcggggaacaccagtgctgtaaacgattgaaccagctgatccagggtttatccccgctggcgcggggaacacccgcgattcatccagcacggcaatttaatgttcggtttatccccgctggcgcggggaacacactaagcatacataactgtttttaaacaaatttattccgcatcaacaatctaccaactaaattaaaacatttccttatttttaaagaacggataacttattgattatcaacaggaagaaaagaaaccaaacgcaacccatccaaatccaccggaatacgtctattttcaccccaggtctgaaattcaaaacctgactcggtattggtcgcccaagccatcactacatttccgcaacctgccagttgagagatttgctgccagatcatctcccgaatacgtttggatgtatctccgacatacacaccggcacgcacttccagtagccagatagcgagccgtccacgtaaacgtggaggaacattttccgttacaactacgatcatactcatccgccgcgtcctcgatgaccgctatcgcctaaggtttcaggttcagggatggcaggcggtaacatatccggcgcgggttgtggtggttcaatttcaccagcggcaagcacttcctcaattaacggaattaacttgcccgttaatttactactacggaaaatatcgcgacaggccaacctgacttctttatctggttctgcgggttgcctcgctgctatttcaaatgcctttggcacaaccaaatcaaatttaatgatatcggctatgtcataaacaaatgaaagcggtttgccgctatggataaaaccaatagcgggcgcatatcccgcagctaatactgcagcttcagaaataccgtacaggcatgatgtggcagcactgatgcaacgattgacaacatcgcctttttcccagtctttaggatcgtatttgcgaccattccatttcacaccatattgtttcgccagtaatgcatacgtctggcgaacgcgggatccctcaattccccgtaactgctccactgaacggcgagctggcggtggctcacgaaaacgtaattcatacattttgcgcaccaccttcaggcgtagatcttccgttaaagccagctttgcctggtagagtaacttatcagcacgcgccccaccgggttgtccggaagagtagacgcgaacacccgcttcaccgacccagaccagtagcgtccccaccgtggcggccagatgcaccgccgcgtgggaaactctcgttcccggttcgagcataatgcaggcgaccgatcccaccggaatgtgcgtgcggatcccggttttgtcgatcagcacgaaagcgccgtccagtacgtcgatttgaccgtactggaggaagatcatggaggtgcgatcttttaacgggatcgggctcagcggtacaaacgtcacgcctctgctccaggtttgatcagcatcagaccacaaccgaacgcccggcttttgccatacccctgactgagacgttgcagaaataacccaggatcggtgaccgtaagcatccccgtataatccacactactgaactggatcagttgccaggagttttcccgccggagttgttgttgtcggtaggcatcaaccgaggtatccagtagtgtaaaaccacttctttccccctgcgctgccagccagtccagcgccgcctgttgttgatgcaaccagacatcacttccttccgcctgtcccctcacctgccgtttcgcctccatcagcagatcgtggcgcttgcccgctttacagattgttggattcgcccgcaggttgaaacaaagttgttgtccggtactcagctcgggcgtaaatgaccggcattcgatggtgaaagtttcactttccgccgggcgttcctgcgagaggacaaaaaagcgaaacgcgccctggagttcttcccgacgataaagaaattgcctttctttgccgccagggaagagatcccacaaccactgatgcatcacatattcaccgcgatccaccagatgcagcaactgcgcaggcgaaagctggccggtatgtaaggttattcttgagaggtacatggttcctccttgctgagccacggcccctgattgatggtgcgttccccaaacagccactgctgacgatttaaaggaacatcccggcggcgtaatattttgcttgcgaccaaaccatcgtgctccccttcccaccagcattcatcctgaagtttcgggagtgagactttcagttcgcggaaacgatcctgatactgttggtatgcgttacgtaagacatcagacgcgttgccttcgagcagtaacggcgcaagtggtaacgccagcggatgactttttcgccccagataaagcggaaaaaccggatggcgtaaaccgtcctgcaactgttcgaggctgtaaggcgcatcgggggttgttgccaccgccaccatccaccaggcatcggtgtagtagtcgcgccgggagataatcgcgctcaaaagctcagggtcgctcaactcttcgcgacggctgaaataacgtgctttacgcacctcttttggcatctggaccgtgtgataatcccgtgcccagcgcgggttacggctggcgcaaaccaccagtgaatagtggcgattaaacgcgtttaagcgttcggtatcatcacgccgaatccctaccccggcagccagtagccccagcaatgctgagcgcgaaggaagttcatgggtatgacgaacttcacctggagcatcgacaccccaggacgccatcggcccatgaagctgaaaaatcagatattggctcataagccgccccttacgcgcagataaagtccagcacgtccttcatgcttccctgtttgttcatcacgtcaaaacttgcgtaatcggtcttctgttcgtagaccgtattcatattttcgcgaagagttgtaatacgctgcaccgccacctctaactgacgggtgccattaatgggttcatagaaagctgccgccagagaacgcggttgatcggtgcctttttctgccagcgcccaggaggcgtaggcacggctggcaaagctgttctgtttgccggttggggagactttaagtgcggcttccgtaaaggcacgtatggtctgattagctaacgcttcgtcaccgccaaggttttcgaccagcagatctttatcaatgcagatataggtgtagaacagtgcagaaccgaatccggtttcaccaagatgcccggcaccggcatcttcagaagcctggcgcaaatcatcaacggcggtgaaaaaatcatcttcgacaatcgtttcactgacaccaaatgcgtgcgctacctggcaggcggcttcaacattaaactcgggtttattcgccagcatacgaccaaacatggcaatatctaccgccatacggtctttgcgtaacaacgcgagatcttcctcttttggcgcgcgcttttcttctgcaagctgatgggccagcacttttacggcgtcaaattctgccgggctgatatggactaactgttcagtttcggcgttagtgagcggatcttttggttttttgtcgtttttagctttcccaagataatctgcaatttttgccgcccattcgatggcttttttctcttcgattcctttctcaatcaggatagttgccgcctcacgcgcaatacgcccactgcgaataccaatatggcccgccagtgcctgttcaaaaagtgcagaagtgcgccacgcacgtttcagactttgcgaggaaacgcgcagacgcgttgctccacccagcaccacagtttttggcgcaccggtatcatcacggttaaggttggcagcagggtaagcggttaacaaatgaagctgaataaatgttgtcatgagatagtcctttattgattttgttcgttatcggcgtcgccagcctggtaatattccagcgcccagcggatacggataaattcggttggccgctgctggcggcggtgatgattgagcaggtcgtcgctctcctggcaccaacggaagaccccctctgccagagagtcaagattgacggaaccgtttaataatctgactgcgcggcgtaactggcgcagtaattcatccggtgtttttactgccgacagacgagtaaaacgcccctttgacattaccgccgccagctgcgcggcaaaaggctgccgttcatcaatagctttaacattggcgctaactgcggctatcagcgccagtgcggtgatacgccactcaggttcatcctgccactttatttgtctgttcttcagaaacaggcgaaatccatccgtcagacaaacatcattaaccgtcgtactacgccgcagactggcacgttcgccacgtttctcctgcaattcctcgtgccatttgcgcagcgtggctttgtgctcctcttttacaatactcattcagcagcctcctgctttttctccctggcggctttagcactttgcttctccgccgatgttgtaaaatatttcttgcgcgcggtcatgacgcgttccagatcaacgggctcataaggattggtgaatacacgctcgtcaaaatcctgacgtgcgaataaccaaatttccttattccatttgctgagtaattcatccgcatcctgaccttcttcaatttggcgcactaacctcagaaagcgatgctgagttttgttccagaagtcgatatccacaaaactaaaatcaccccttgcaccttttggatcggagaaccatgcttctttcaatgcactccgtaacagacttagaatccgtgaagctgtttgcgcagccagccgcagcttcggtatctgaccttcttttttatcgagcagcagcgggaaatggtgttcgtaccaacagcgcgctttcatgttgtcgaaatcatagccaaatccccacaggcccacttttgcctgcttgagactgctggcattgaagagtttcaccaccagcgcgggaagttccgtattgttttctgatttacccgtttcgataaggcctaaccagtcacgccagattaaaccgcccggttgtggtttaacggagtaaaactcgccaccctctttaagtggtacacggtaaggcgttaagggatgctgccacatggcataattcgcaccgtaatttttggtcgtcatcaggctcaggagcgcgtcgctctgctcaccgcaaatatcgcagttgccgactgtcgtggtattaaaatcaatacgaatacggcgaggcattccccagtacgcctggagtttattgacctgctcatcggttaccaccgcaccggccagttcgctggtgcgcgtcgggccaagccaggggaaaaccagatcgtcaaattttttgggtagcggtaaatcggcttcatcctgcggcatgacattgatccacagtttgcgccacaagggagtttgttgattaccctgatattcctgtaattcaatcagagtggtcatcggcccaccgccgcgtaaaccggtgcggtagcctttgccacctgacggcgcattcaactgtagggagaacagagctaacgcagaacaatgtgggcacaggtattccgttacaccacgcttgataaagtggtctttattaaacttcgttgtttgagcgccgggaatctcaggcagtagcgaagcgaccggaactttatctccggtgagcgcctcgaaatcctgcataaatgaaggggaatctggcccaaactggaaagcatgttctaatgactgcaatgcttcccgtagcttttcagcttccagtccgtcttcccagatatcatcccaacgacgatgatcttttggcgcgaagctggtttgtagtagccccagcaaaaactgccataccgcaccctggagatctgcccgcggcgcagaaatatcgacaacattttcatccgccagatcgactggcgccagtttgcctgtcgttccgtctttaaaacgaacgggcaaccacggggttgtcagaagtgaaaacgagttcatacgcatcctctcgtaaaaaagaccatcccaggtcggttgtccatctttccatccttttcggtgtatcaactattcagagagtcctgtcgcagacatctcaaccaaccttgccaatcaatccttccgtagccgaatacccgcaactttcgtcatcgttgactaaaatcacgtttgccatctccggatcttgtcgctgttcaatgcaccacagcctgaacgcctctccctccagtaaagaaaactcatcccgatgttttttccaccagcttcggcgcactctgacaacgctcatttcccatgcgtgagcaccggtggcataaggcttcaccacaccgtcaatacaggtagccagccacagggaaacagactcctcagccagacgtgtcgacagtttttccgggaggtaatcgttgatattggcggcatagccgggcctgaagttcagcacaaactttttagccattgcgcgatcacagtaatatttgcccacttgctcctgctcgctgcgggcaaatccttccggcattaccacgtcctcaccgtagacggattcaataagaagccgggctgcgtgtggcatctgaatagcaccttgctcacgcagcacacgctgcgtcagccagattcgcccatgatcgggatagacaaatgcactgttacgcatggcactgccaaaccattcgtcgccaggagagtcgtcccagacgggagccagaatcagcaattcagggggggaacgctcgtcctttccgtcacgctttaactgaccattaatatcgcggatatgccgctgtaatcgtcctgctcgctgaatcagcaaatcaacaggggccaggtcggagatcatttcgtccaggtcaatatccacgctttgctcaattacttgtgtacaaacaatgacttgcgacgctctctgtaaactacaatatttaccaaagcgtgccagcgtttccgtttcaattcgctggcgatcgctaaaagcaaagcggctatgaaaaagtgaaaggctggaagcaggaatgacgccgcgggcaagcagctgacgatgaaccttaatagcgtcatcgacagaattccggatccaggcgatgcatttcccctgacttaccgccgattcgatacgcgcaatacactcttgttcactatgaagccaacccacgctgacgctacgctcaacgtctttgcgcgtcgctacccggtgtgagttcacatcggatttcgtgacatgcgtcagccaggggtaatcatccttttccaggaacggagcttcttgctggccctctgtaccccgcgcaaaggcagcgacgagtttgtcgcgctgctgttgagataacgtggcagaaagcaaaataacgctgtttccgccacgcgcctgccgctcgatcaacccttcaagaatgcacgacatgtaagcgtcacaggcgtggatctcatcagccagcaggattttgttactcagccccagaagccgcagattattatgtttgaacggcatcaccgccatcatcgcctgatccagcgtgccgacgccaatttcagccagcaacgccttcttgttactgtcggcaaaccaggccgcacatccctgactgaacgtttgttcatccggttcttctgacccgactaaatcaccagaccagagtgattcattaaagcggtccattaatgtgcgggcactatgtgccagcaccaggctggggcgggattctggcgaatagaaagcaagccaggttttgaccagccgatcgtacatggcattggccgttgccattgttggcagaccaaaaaacagcccctgagctttccccgcagctatcaacctgtgcgccaggataagcgccgcttctgttttacctgcgccagtcacatcttccagaataaataactgcggtccttgctggctgatatccagatccagcaccttttgctgtaacggtgtcggattctcaataaaaggaaacagcgtattaattccgttgaaaggcgcgacttttgcttttagaggaaagacggttaaggcgttttgagcctgaattaaagttttctgccagtaacctttaatatccattgggtgtgcgacgcgtggaaaaaatcgcgttgacgaacccgtccagtctgcgagcacgacggttgcagagatataccaggaaaggtgttttataagttcaatgccctcatcatcatcccagaatgcggggatctctatgagcggaaacagtggtttgatttcaaggagaaaatctcgtgctgcagctttgtcttcaggcagaaaattatccaattcatccatacgatcagggggccgaccatgatgccctgtcgtcacgggcatccacatttctatcactcgcctaagtttgcgcggagagagcgaagatgaaggaagtaactcctgacattcacttaaataatgattccacaaccagtagcccagcgttgaatgagagattttttcgtaattttttctggcaccttcctgaatcttgagttcagggggcaggtaaagttgttgaaaagagcgggcaaattttccaatatcgtgccagcacagcaaccaggcgaaaaattgagccgcctgttccttgtcagaaatccctaattgacgaaaataatcagccagcccgaagcaatttcttttaaccattaaatagcccatcgcggctacatccagcgaatgccagcaaagaaggtgatagtcgtcgcccccgtctttctcgccgcgtcgggtttttccccagaaatcaaaaaaagtcacaatatttttatccttcagtaaacttaaaggatatttacgcatatattaaaaattatctgtgatatatatcattcaataaaatatttacattatgaataatcaaataaatttcatccgtaatatatatgaataataaacataggcataatattcacataaacaatataaattaaaaaagggtgcaggagaccaaaccatcacaattcagtacgcggggttttaccccataagcgctaacttaagggttgtggtattacgcctgatatgatttaacgtgccgatgaattactctcacgataactggtcagcaattctggcccatattggtaagcccgaagaactggatacttcggcacgtaatgccggggctctaacccgccgccgcgaaattcgtgatgctgcaactctgctacgtctggggctggcttacggccccggggggatgtcattacgtgaagtcactgcatgggctcagctccatgacgttgcaacattatctgacgtggctctcctgaagcggctgcggaatgccgccgactggtttggcatacttgccgcacaaacacttgctgtacgcgccgcagttacgggttgtacaagcggaaagagattgcgtcttgtcgatggaacagcaatcagtgcgcccgggggcggcagcgctgaatggcgactacatatgggatatgatcctcatacctgtcagttcactgattttgagctaaccgacagcagagacgctgaacggctggaccgatttgcgcaaacggcagacgagatacgcattgctgaccggggattcggttcgcgtcccgaatgtatccgctcacttgcttttggagaagctgattatatcgtccgggttcactggcgaggattgcgctggttaactgcagaaggaatgcgctttgacatgatgggttttctgcgcgggctggattgcggtaagaacggtgaaaccactgtaatgataggcaattcaggtaataaaaaagccggagctccctttccggcacgtctcattgccgtatcacttcctcccgaaaaagcattaatcagtaaaacccgactgctcagcgagaatcgtcgaaaaggacgagtagttcaggcggaaacgctggaagcagcgggccatgtgctattgctaacatcattaccggaagatgaatattcagcagagcaagtggctgattgttaccgtctgcgatggcaaattgaactggcttttaagcggctcaaaagtttgctgcacctggatgctttgcgtgcaaaggaacctgaactcgcgaaagcgtggatatttgctaatctactcgccgcatttttaattgacgacataatccagccatcgctggatttcccccccagaagtgccggatccgaaaagaagaactaactcgttgtggagaataacaaaaatggtcatctggagcttacaggtggccattcgtgggacagtatccctgacagcctacaaaacgcaattgaagaacgcgaggcatcgtcttaacgaggcaccgaggcgtcgcattcttcagatggttcaacccttaagttagcgcttatgggttttacccccgcgtggtggctacttcttcgattcgtaagcgagaactgccttaaactccataccacgttctctgatactcaactcacacaacgagtcgcctaccatcagcgtgaatcccagtactgtaaaacacagcactatgattgccacaagggcatattttgtcagcatgtcttgcctccctgcaaagaagagactaacattcgaattgtttgggttcgaacgtaagcctcaggttgatagaaatatcgcctggggcttttgtccatctggaacctcgcgaatgcttaacgccagacagcctcaagcacccgacgccattctatacctgataattcttccagcggcgttcacgtttaaaatcaggaatactgctcgcaaaataaaaacgcccccatcatttctgacagaggcgtttaatttatccggcaatatttacccttcgtgcaatccacattccctttttaagccaaagaaacgtgtttcttcttccgacatgccaggttcccatttacgggttgtatgggtatcaccgaccgataaatatccttcatcccataatgggtgatatttcaggccatgtttttgcaggtactgataaatagttcggttatcccagtcgataatcggcagcactttaaatacgccacgctgaattgccagcaccggtaaattggcgcggctgccggattgttcgcggcgcaggccagcaaaccaggtttgcgcgttaagttctttcagcgcccggttcatcggttcgactttgttgatgtcattgtacttttcaatgccttcaacgccctgttcccacagtttgccgtagcgtgcttcctgccaggcggcgctttcggtagcacggtacactttcaggttgagcttgagtttgtccgttaactcgtcaataaagcggtaggtttccggaaacagataaccggtatcggtgaggatcactggaatatccggccgaatctgattcaccagatgcaggctcaccgccgcctgaatgccgaagctggaagaaagcacatattcaccgggcagattatccagcgcccaggctacgcggccttcagcgtccagtttttccagttgggcgttagtttccgccagcgccagaatgcgatctaccttcggcagttcgttcagggcgtttagatcgagtttggacatagattcctcactgtttgccttgcctgatgcgacgctcacgcgtcttatcaggcctacaagaccgggctgatggttaatcccacaaatcgcgcgccggatcgagcaccgggcgaatgatgcccgcacgcaccgtaaagtcgccgaagccttcacccgcttcgcgctctttcgcccagcgccctatcagttcatcaagcgacgccaggatttccggctcggtgatgttttctttatacatccgagggatacgtgtcccaatgcggttgccgccaagatgcaggttgtagcgacccggcgctttacccaccaggcccacttccgccagcatcgcgcgaccacaaccgttcgggcagcctgttacacgcatcacgatatgctcatcgctgacaccatgtttcgccattaaattatcgatgttgtcgataaaagacggcaggaaacgctccgcttccgccatcgccagcgggcaagtcgggaatgacacgcaggccattgagttttcacgctgcggcgtgacggcattcattaacccgctctctttggcgatcttctcgatcttcgctttctcgctttccggtacaccggcgatgatcagattctggttcgccgtaatgcggaaatcgcctttgtggatcttcgcgatctccagcaggccggttttcagcggacgcgccggataatcaaggatgcgaccattttcgataaacagcgtcaggtgccagttatcatcaatgcccttaacccagccaatacgatcgcctcgtccggtgaactcatatggacggatcggttcaaatttgatccccgcgcgacgctccacttccgctttaaacgtctcaacccccacgcgctccagcgtgtatttggttttggcatttttacgatcggttcggttaccccagtcacgctgagttgtcacgacggcttcggccaccgccagcgtatgctccagcggcagatagccaaactcactcgcggtgcgggcgtaggttttcttgttgccgtgttcgatggaaagcccaccgcccaccaacaggttaaagcccaccagcttgccgttttcggcgatcgccacgaagttcatgtcgttggcgtgcagatcgatatcgttctgtggcgggatcactaccgtggttttgaatttacgcggcaggtaggtctggccgaggatcggttcttcatcagtagtggcgactttttcctggtcgagccagatctccgcatacgcgcgggtacgcggcagcagatgctcagaaatcttcttcgcccactcgtacgcttccgcgtgtagctgcgactcgtaagggttcgaggtgcagagtacgttacggttcatgtcgttagcggtcgccagcgcatcaagaccaaccgagtgcagcatctggtgcaccggtttgacgttctttttcagaatgccgtggaactgaaacgtctggcggttggtcaggcgaatgctgccatagatggtgttttcaccggcaaatttgtctatcgcctgccactgtttagtggtaatcaccccacccggcagacggcagcgcaacagcatcgcgtggcgcggctccagcttctgttcagcacgttcggcgcggatgtcgcggtcatcctgctgatacatgccgtggaagcggatcagcaggaagttgtcgcccttaaagccgccggtcagaccgtcgtttaaatcttccgcaatggtgccgcgcaggtagttgctttcaagcttcatgcgctcggcgtctgtcagttttccttcgaccactaaaggccctggatgtttttcgctcattagtagacatctcgctgataacggcgctctacgcgcagctcacttaaaaattcatccgccgcttcggtgtccatgccaccaaattcggcaatcacttccagaagtgcctgctcaacgtctttcgccatgcgattagcgtcaccgcagacataaatgtgggcaccgtcattgatccagcgccacagctccgcgccctgttcgcgcagtttgtcttgtacgtaaactttttctttttggtcgcgcgaccaggcgagatcgatccgcgtcagcacaccctctttgacgtagcgctgccactccacctggtagaggaaatcttccgtaaagtgcgggttgccaaagaacagccagttttttcccggcgcttcatcggcagcacgttgctgcataaaggcgcggaacggcgcgatgccggtgcctgggccaatcataatcaccggggtttctggattggctggcaggcggaagttatcgttatgttcgataaatacgcggacttcgccctcttcttccacgcggtcagcgaggaagctggaggcaccaccggcacgggcgcggccttccacgtcgtaacgcaccacaccaacggtgacgtgtacttcgttctcgacttccgcctgcgaggaggcaatggaatagagacgcggcgtcagcgggcgcagcagattaattagcgcttcggcatcaagctgtgccggggagaaacgcaccatgtcaacaatcggcgtcgtcgcggcgtaatgctgtaacttcgctttatcgcccaccagcggcagcagtgtttcactgcgggtaagcgtggcgtaattctcaacaatgttggcggtgttgacggtcagttcgaagtgccactgtagcgcttcgttcagaggcaacgttttgccctcgacggtgacaggttcatcgcctttcagccacagcagttcgacaagttctttcaccagtgccggatcgttctgataccagacgcccagcgcgtcacccggctggtaacgcaggcccgagtcacctaagtcaatttcgatatggcgaacgtctttttcagagttacgcccggtaattttctggttaacagagaggctagccaccagcggcgcgtctttgctgtacgggctggtgtggatttcatttaccgcgccagtagcgacggattgcgaaggtgccgcgacaggcgcacgcgatttaagcgcatcaaccacgcgggcgcgccactcgctggcagcagcctggtattcaacatcggcatcgacacggtcgagcaggcgttcaccacccagttccgccagcttgctgtcgaaatctttcccggactggcagaaaaattcataagagctatcgccgaggctaaacacggcaaacgcggtgttttccagctttggcgcttttttggagaacaggaacttatgcagcgcgacggcttcttccggcggttccccttccccttgcgttgacgtcactacgatgagcagtttttcgctggcgatttgtttgaatttatagtcgcccgcgttcaccagcttaacgttcagttttgctgctaataaatcatcacgtaatgcttcagcaacccggcgcgcattgccggtttgcgaggcggagataatagttatacccggcatttctgcggctggcgctggcgtcgctgcaagcgcagcaggctgctgattgagtacgccccagaaatagccagaaacccaggcaagctgggtgggagttaaatcggtcgtggccgcctgaaggcgtgccagttgctccgggttcaacggaagcaacgcggaaggtgggacctgtgtcgtcatgcgtcgttatgttccagtaagcaaagctgtttctgcgccctgtcagcgcccataaaacagaagagaaggtaaggttaacggggcaaacggtgtggattaaagacgggatagcgataactaataaccaaatcgactaacctgttttagcaatagtctttaacaacaaaatagattaaccaacctaatgaaaaacaaatgaatttagccaatcattaagataaatcagcgattttgcgcaacaaagtcgttttagataatgcgaaaaaacagcctttccggtactctacggcggttttatcgtcctgtagagaaattatgatgtccaccacgttatttaaagatttcaccttcgaagccgctcaccgcttaccacacgtcccggaagggcataaatgtggtcgcctgcacgggcattcctttatggtgcgactggaaattaccggggaagtcgatccgcatacgggctggattatcgatttcgctgaactaaaagcggcgtttaaaccaacctacgagcgcctcgatcaccattatctcaatgatattccaggtctggaaaacccaaccagcgaggttttagcaaaatggatttgggatcaggttaaacccgttgtgccgctgttaagtgcggtgatggtaaaagaaacctgcaccgcaggttgtatctatcgcggcgaatgataagagtgtgtcggcggtcaatttcccttaagtaacgctatgttagggtgttgtgttctggatatctggggcatgacatggaagacgactgcgacattattattattggtgccggtattgcaggcaccgcttgcgcgttacgctgcgcgcgagcgggtttatccgttttgttactggaacgcgctgaaatccccggcagcaaaaatctttccggcgggcggttatatacccatgcactcgcggaactcctcccgcaatttcatctgaccgcgcctcttgaacgacgcatcactcacgaaagcctttccctgttaacgcccgatggcgtaacgacgttttccagcttacagcccggcggtgaatcctggagtgtattacgtgcacgattcgatccgtggctggttgccgaagccgaaaaagaaggtgtcgaatgcatccccggagcgacggtggatgcactgtatgaagaaaacggcagagtctgtggcgttatttgtggtgacgatattctccgcgcccgttatgtggtgctggcagaaggtgccaacagcgtcctggctgaacgtcacgggttagtggctcgtcctgctggcgaagcgatggcgttggggatcaaagaagtgctgtcgctggaaacatccgctattgaagaacgttttcatctggagaataacgaaggcgcagcgttgctgttcagcggcaggatctgtgatgacttacccggcggcgcatttctttatactaatcaacaaacgctctcgttagggattgtttgcccgctctcttcccttacgcaaagtcgtgttccggcaagcgagctgctgactcgctttaaagcgcatccggcagtgcgcccgcttatcaaaaacacggaatcactggagtatggtgcgcatctggtgccagaaggtggcttgcacagtatgccggtgcaatacgccggtaacggctggctgctggtgggcgatgcgttgcgcagttgcgtcaataccggaatttccgtgcgcggcatggatatggcgctgactggcgcgcaggcggcggcacaaacgctgataagcgcctgccagcaccgcgagccgcaaaatctgtttccgctttatcatcacaacgtagagcgcagcctgctgtgggatgttctacagcgttatcagcatgttccggcgcttttgcaacgcccgggatggtaccgtacgtggcctgcgttaatgcaggatatttcccgcgatttatgggatcagggtgataaacctgttccaccgctgcgccagttattctggcatcatttacgtcgtcacggcctgtggcatctggcgggcgatgttatcaggagtctgcgatgtctgtagcccgtaatctctggcgcgttgctgatgcgccgcacattgttccggctgactccgttgagcgccagacggcagaacggttgattaacgcctgtccggcaggtcttttttcgctcacaccggaaggtaacttacgtattgactatcgcagttgcctggagtgtggcacctgccgtttgctgtgcgacgaatcaacactacaacagtggcgctatccgccttccggattcggcatcacctaccgctttggataaataataaggataatttatgcccctcttacacctgctccgccagaatccggtgattgctgccgttaaagataatgccagcctgcaactggcaatcgattctgaatgccaatttatttccgtgttgtacggcaatatctgcaccatcagtaatatcgttaaaaagattaagaacgccgggaaatatgcttttattcatgttgatttgctggaaggcgcgtcaaataaagaagtcgttattcagtttttgaaactggtgaccgaggcggacggcattatcagtaccaaagcctcaatgttgaaagcggcaagagcggaaggttttttctgtattcatcgcctgtttattgttgattcaatttcgtttcacaacattgataagcaagttgcgcaatcgaatccggattgtattgagatcctgccaggctgtatgcccaaagtgctgggctgggtgacagagaaaatccgccaaccgctgattgccggtgggctggtgtgcgatgaagaagatgcgcgtaatgcgattaacgcgggtgtcgtggcgctttccaccacgaataccggggtctggacgttagcgaaaaaattactttgacgggataatcgtaaccaattgaatttggtttgatttgtaggccgcacgccacatccgacattcagcgcctgatgcgacgcttgacgcgtcttatcaggcctacaagtccccaggccagaaccgtaggcaggatcatccggcaacacgttattggcaatctgcgtgaatgtttgtcaccagtgcctccagcaccactttccagtcatcaaccacgccaacatctgcctgtgaaaataccgcagcgctggcgtcatgattaatcgccaccacaaacttgctattgcgtacgcccgccattaacgctgctgcgccagaagcgccaacaacaatacacacctcaggtgccagcagatgtccggaaataccaatcactttttcagcatcaacgccaccgttcatcactcgcgcccgactgtagcccacttcggctcccagcttttctgccagcatagcgatttcctggttatctgcctctccgccctgccccaccaccagcacccgtctggcctcagctaatgggtcgcgggtaacatttttcagatcctctgtgctaaccagccagtccggaagcgcacccgggacaatgttcagttgttgcattccagagggcaacgtggcgtttttcgctgctcccgcctgacgcgccagggaaaggcatagcgggcgtttttctgtttgcagcgtcgccgttagcgcatttccccagtgggatttgcgcacgcttacggttggaatatctaacgaagtcacctggcagatgcttgcaccatgtaaacgccaggccagccgggtcgacagttcatcgccaaacgttcccggcggaaagagaacaacgtccgcaggcgttcgctgccactgttccaccaacgcatccagcacctgttccgccactacaggctgaggttcaatctgccagtgcgccagggtacaaccgctgaaatcctgcgccgccagccagcttgctattgcggcattctcctgatttattgtcacaattgcgatattcatggctgcatcctttggcgtaaatagtcctgccatagcttttgagctttttctgctaccgtttgcccatcaatcagcgtcgctccgcgtcgttgctctgctcttgccagttgcagacactgcatcgctggcatttcggcagcaacagttttacggataatttctgctttccccgcagccattcgctggcgcattcccggtactggcaaggccacttcaccgcactgacgcacggcaatcaccgcaggcaagcgaacccggcaacaacgcaacccatgttcagtacgctgttcgagggtgataaacagcgcgtcgagagtgaaacgctccacctgggtgaagcagggccagcccagcatttccgccagcaaaaatggcgtttgcccattctgcccttcgctgctttggcagccggtaattatcagatccagcggattctgatgctgccattcggcaatatggcgagcgacaaattccggcgcaaagcgcagatctgccgccgtctccagcaatacagcttcctcaaacccaagagccatgagatagcgcagccagtgcaatgcccgttcatcccccatgctcaacgcggttaaagacatcggcgtaccgttttttctctgcgccaacagcagcgcggcagcggcctgttcatcagcaccgagtaaacttcgcagtagcgaaatatccggtccgcttttaccctgagccgccgcctgccactctttttccgccagcattccggcatccggttcggctttaaacgctaacagaatgttcattcgcacctcctacatttcccgccgccaccagcgggagggctttagtttctggtgcccatagccaggtcacaacaaaaccaaccaacaacactgtcgccaggagcaataaggtgacttgcattccccactgcgccagcacccacggcagcaggccagtacttaccgccgcgccaagtcgactcatggcagtggcaaaaccgacgcccagcgagcgaatgtcagtaggaaaactttccgcaggcaaaatgcccaccagattactgactgccgaaatggtggtgctgaagagaacaaaaagcagcagcgttaatgaactgccggaaggcaaacaggccatgactaccagcgttgccgccagcagcaaaaaacttcccagcaaaaatttgcgatgtgccagcaggtgcgtcagaactaatcccagcagcgcgcccacaattaacaacgcattaagcatcaggctggcagtcagcgcatcttccagaccaatagtctgggcgatagttggcagccaggtataaatcacaaaccatgggattacgaggcagacaaagaagacgctgttaaacgccgtgcgccgccagtaacgcgaagagaacaaggttttgatgtgtttatgggtcgccgttaccacttcatcgcccagtaaaacatggggaccaaaatagcgatgcacgatagcgtgagcttctgcaaaacgcccctggcgcagtagccagcgtggtgattctggcgttccccagcgtaataacgtaatcaacaacgcgggcagagctgccgatgccagtagccagcgccaggcctccgggttttcggaaataaagtgatgtccggcaatacttgccagcacatagcctacggtccacaccacgctgaatgcgcccagcaaaataccgcgatggcggcgcggggaaaattcagccagcaaggtgtgacctactgaataatcgcctcccagaccaatgccaatcaaaatgcgcagtccaataagatgctctggcgtggtggcaaaaaattgtaaaaacgaagcaagcgtaatcagcaaaaagctgaaggtgaagattttttgccgaccaatatggtcggagatccacccaagaaccaggctgccaaggaacaaaccaaggagcgccgagccgccgatcattcccgccataaacggcgtcagttgcatggcgggcgtaagctgaataatggcgtaaccaatgacgccgagaacataaccgtcggtcaggtgtgcgccgaaagtgagcgcagcaatgcggcagtgaaaacggttaagcggtaaatcatccattcgcaccggtgaagtgttcatctttaccccttcattgtccggtaataagaacggcttctcgcctgagaagccgaaaaggcaacgccccgtcatcgcggaacgctgcctgacacattatttttcaatcggatagatagtacccgtattcataatgccattaggatcgaactgctttttcagcccttccagcaacgcccacgcgctgccgtgttccagtttgctccagtgaacgcgatgtttaccgataccgtggtggtgcaccatcgaaccgccgaggcgaatggtttcttcacagatgatcttgttgagcggattgtggtacttgtcgatttcctcttccggcttacagtcaacgacgttgtaatcgtagacgaagtacatgttggtgccgttctgatagctatgagaggaatgaccgcccagcatggtgatgtcgtcggcgtgcgggaactcagtacgaatacggttaataacgctttcgtagatttcgtggatgcagctccagcagccggatacttcggtggtaaagcccatgttgccggttttgaggatctgcacacgttcggcagccactttatccggtccccagttcaggttgttaaaccaggtttcgatcagcttgctgtccacgcgctggcattgcgggtagcgggcaacgatttccgcaatcccttcgcccgtcaccttcgcaatgcgagggttaccttcagccataaagatcagcacgcattttccgtcggcaaaatgggtgaagtgttgggtgccatcttcagcgtcatacaaacgagcgattgacggacgatacccttccaccatgatttcacgcaggatgttgaagccggttttcatgtcttccaggatatagccgtagaagaggttgttttccggggtgaatttaaagattttcactgttacttcagtgatatagcacaatgcaccttcgttgccgatgatgatgtgacgaatgtccgggccagccgcgcggcgtggcacgtttttaatgcgtgtgacggtgccatcagccaatactgcttccagaccaacgaccatatcttcgattgcgccgtagagtgtggagaactgcccgatacttcgggttgctaccaggccgcccatctgcgccagcggctttgactgcggagaatgccccgtggtgtaacctttttcacgcaacgcgttttccagcacttccagcggaacaccacattgcgccgtcgcctgcatattctcaatatcaatattaatgatttgattcatggcggagccgtcgagcaccaccgagttttctacaacagtttccagcccaccttcggtggcggaagcaccggtacgcggcacaccgttaattttgtgcgcattcataaaattcagcacacgggatacttgctctgtggaaccgagttttacgaccgctgccggaatcggcaaagtataaatgccatgaatatccggaaatttacgaaaacggtcaatactgtttttctttaatactgtttcatcggtaattacgcgatctgcaccaacaatttcctttagctggtcgacaatcgctgcgcgagataaagacatagtaattccttcctgataataaaaatggaataatcattaataagagaaaacagaaaccaccgttatgggttagcgcactaaataaccgccatcaaccactaataaatgcccgttgacataattcgatgccggacttgcgaggaatacggctgcgcccattaaatcctgagtatcgccccaacggtttgccggaatatgatcaagaacgcgctgattggtttctggattactgcgtgtcgccagcgtaatatctgttgcataatagccaggggcgataccatttacctgaatattatattgacctagttcatcacaataagctttggtgaacccggcaagagcatgtttagtggcagaatatgcaggtgaccattgtccacctaagtaagagaacaatgaacagatattaataattttgccgcttttctgcgggatcataatttttgcagcttcatagcttaactcgaatgcggcggtcaggttcacatcaatcatcggatcccagtcggcacgaccgaagtccagcaccttattcagcttacaaataccggcattgttaaccagaatatcaactgtaccgaaacgctcacagcaagcagcgataatcttctgcggcgcgccttctgcggtgatatccacctgcatgaagtccacctcaacaccctgtttttcaatcatttcctttgtttcgccgttatctttgacgaaactaggaataaagatatttgcgccagctttggccaacgccatggcaaatgcctggcctaaaccgctattcccaccggtaacaattgcggttttacctttcagggagaaaaaatccattgagaacgcattgagagattcgattgacatagttagctccaatttccgtaaggcaaaaaaaaagaaaggtaacttcccccgcgagagggaagttacctttctcattatctctggtaactggagataatttttagcataagggcataactgctaatgtgatcgtaatcacagtgtgatattcgtattgtcaaataattttaaaaagcagaagcgtgattactctcacacaacacctctgctttccatgttatttattatttcaattactagagacctgagaaaagtaatccacctgaaagggcggcttacttttctcttttttttgtctattacaaatgggaatacgatatgcaacacaactcatatcgccgttggataaccctcgcgataattagttttagcggcggcgttagtttcgacctggcttatttacgttatatttatcaaattcccatggcgaaatttatgggattcagcaataccgagataggtttaataatgagtacctttggtattgcggccattattctttatgcccccagcggcgttattgccgataaattttcacaccgcaaaatgattacttccgcgatgatcattaccggattactgggtctgttaatggcaacgtatccaccgctgtgggtaatgctctgtattcagatcgcctttgcgataacgacgattttaatgctgtggtcggtgtcgattaaagctgcatcgttgcttggcgatcatagcgagcaagggaaaattatgggctggatggaagggctgcgcggcgtcggtgtaatgtcgctggcggtgtttaccatgtgggtcttttctcgctttgcaccggatgacagcaccagcctgaaaacggtcattatcatctatagtgtggtttacatcttgttggggattctgtgctggttttttgttagcgataacaacaacctgcgcagtgccaataacgaagaaaaacagtcattccagcttagcgacatcctggccgttttgcgtatcagcaccacctggtattgcagcatggtgatttttggcgtcttcaccatctacgccattctgagttactccaccaactatctgaccgaaatgtatggcatgtcgctggtggcggcgagctacatggggattgtgatcaacaaaatattccgcgcgctgtgcggcccacttggcggcataatcaccacctacagcaaagtgaaatcccctacccgcgtgatccaaatcctttccgtactcggcctgctgacgttaactgccctgctcgtcacgaactctaacccgcaatcggtcgcgatggggattggcctgattttactgctgggattcacctgttacgcctcacgcgggctgtactgggcctgccctggcgaagcgagaacaccgtcttacattatgggcaccacggtaggtatttgttcggtgattggattcctgccggatgtcttcgtttacccaattatcggccactggcaagacaccctgcccgctgcagaagcctaccgcaatatgtggctgatgggcatggcggcgcttggcatggtgattgtctttacctttttgctgttccaaaaaattcgtactgctgatagcgcccccgcaatggctagcagcaagtaagccaggaaaattacaggagaaaaatcatgtcgaaaaaatacatcatagggattgatggcggaagtcagagcacaaaagtggtgatgtacgatctggaaggtaacgtggtttgcgaaggcaaaggcttattacagccgatgcacacgccagatgccgatactgcagaacatcctgacgacgatttatgggcatcattatgttttgccggtcacgatttgatgagtcagtttgccgggaataaagaagatattgtcggtattggtctgggatccatccgttgctgccgtgcgttattgaaagccgatggcacgcctgctgcgccgttgattagctggcaggatgcacgcgttacacgcccttacgaacacactaaccctgacgtggcatatgtcacctctttttcgggttatctgacgcatcgcttaaccggcgagtttaaagacaatatcgccaactattttggtcagtggccggtggattataagagctgggcatggagcgaagatgctgcggtaatggataagtttaatatcccccgtcatatgctgtttgatgtgcaaatgcctggcaccgtcctcggacatatcacaccacaagccgcactggcgacacatttcccggcaggactgccggttgtttgtaccaccagtgataaaccggtagaagctctgggggccggattactggatgatgaaacggcggtaatttctcttggcacttacatcgcattgatgatgaacggcaaagcactgccgaaagatccagtagcgtactggccgattatgtcttctattccgcaaacattgctgtatgaaggttacggtattcgcaaaggcatgtggacggtgagctggctgcgcgacatgctaggcgagtcgttaattcaggatgccagggcgcaggatctttcaccggaagatttactcaacaaaaaagcttcttgtgtgccgccaggctgtaatggtctgatgacggtgctggactggctgaccaatccgtgggaaccgtacaaacgcgggattatgatcggctttgattccagcatggattacgcatggatatatcgttcgatactggaaagcgtggcgctgacgctgaagaacaattacgacaatatgtgtaatgaaatgaatcactttgcgaagcatgtgatcattactggcggcggttcgaacagcgatctgtttatgcagatttttgccgacgtgttcaaccttccggcacgacgtaacgccattaacggttgtgcaagcctgggggcagcgattaatacagcggtaggtctggggctatacccggattacgcaacggctgtcgataacatggttcgcgtgaaagatatctttataccgattgagagcaatgccaaacgctacgacgcgatgaataaaggcattttcaaagacctaaccaaacatactgatgtgatcctgaaaaaatcgtatgaagtgatgcatggggaattggggaatgtggattcgatccagagctggtcgaatgcgtaagtgaggaaggccgggcgggaaactgcccggcctgaacatacctgaatggttatccccgctgacgcggggaacataataaaaactttaactagttcggtttatccctgtttttacaaggaatattaactacactcgatgtctttagaataaaagacaatacgaatcgcactttatcaattttcacttaaagtatgaactggatatctttattcataagaactattcatcaacagcgtatagaggcggttatgtaaaaccactcattagcctcaaaacaaagacaaacttccagatttattacttaaccaatgaataacaagcttaaaaaatatactgttattctaaagaaaaaattaacaggcattaattcaatattaaaaaaataatagattaaaatttcttaacgatttaagaatcatacaaataacactttgattaaatttaattttttgtatcgataattgtgaacctctctggcatggagaactattttgaacatgaggtgttacgtggatatgttgcttattacaagtactgctaatataaaaacttgagaaagagataacgggttatatggtggtttatccccgctggcgcggggaactcgacagaacggcctcagtagtctcgtcaggctccggtttatccccgctggcgcggggaacacctgttttcgcaaatctatggactattgctattcggtttatccccgctggcgcggggaacacgggcgcacggaatacaaagccgtgtatctgctcggtttatccccgctggcgcggggaacacgaaatgctggtgagcgttaatgccgcaaacacaggtttatccccgctggcgcggggaacacattacgcctttttgcgattgcccggtttttgccggtttatccccgctggcgcggggaacactctaaacataacctattattaattaatgattttttaagccagtcacaatctaccaactttatagtatcacacaaacaacacatccattatgttaaagagcacttaatccattgattaaaaaggtaaatatttaaaataactctatacaaactaaaatctaccaaactttaccgcaataattttcactccagcgaaaaattaatgccacagaatttgtagagaatgctaatgattagccctggatgggtaaaatggaggagttttcagaggcgacaaacaatataaatgagtagaagtctttacaggttccacccatttataacgcttataaatgtttaatcaggcaatatttagatatttatgtgtttgcatcgacaaacgccaattacgcgcaatgcaggtttcaatgcacaaacgtgtggcatcatccttttggctaatcggctgcagtgcaatgactcgcggtttatcatcggtcagcgttgccagtagttcatccagtgcttcaatatcgcgtacgcgccccactggatgcttgatttcgttggctcgctccagtgcctgtgacaacacttcatagccgccgcgcatgttcagctttggcgatacggtaacccaggtattcggtgtgcagcgtacctcatgagtaccactggtttcgatctggcagctaaaaccgttcttttcgagcagatcagtcagtggcagcaaatcatgaatgcaaggctcaccacccgtaatcaccacatgccgcgcggtgtatccctggcgaccaatgacagccagcaaatcttcactgctcgcagccccccacttatcactctctttggtcttcgccagaatgctgaaaagggagacttcccgatcctcaagcttttcccaggtgtgtttggtgtcgcaccaggcacagccaaccgggcatccctgtaaacgaataaaaatggcgggaacgccggtaaagtaaccctcaccttgcagggtctggaacatctcgttaatcgggtacagcatagcattctctgtgaagtggataattgttaattattgcagatcctgccacaacaatcatgtcttattaacattctgttacaggcaggtttaaagaaaaatgcgaaacatatcgttaataattaaagggagtaacgtattatgtcagaagaaaataaagaaaatggatttaatcatgtcaaaacattcaccaaaattatatttattttttctgtattagtttttaatgataacgaatataaaattaccgatgccgccgtcaatttatttatccagatttaatgagaaatttataatgcgctatttcatactaatgttcactttcgtatgttcctttgttgcagcccaaccaactattgtcccacaattacagcaacaagttacggatcttacgagtagcttaaactcacaagaaaagaaagaactgacgcacaagttagaatctattttcaataatacccaagtgcaaattgccgtattaattgttcccacaaccaaagacgagacaattgaacaatatgctacaagagtttttgacaattggcgtttaggagatgccaaacgtaatgatgggatactgatcgttgttgcctggtcggatcgcactgtccgcatccaggtaggttatgggctggaagaaaaggtaaccgatgctctggctggagatatcatccgtagcaacatgatacccgcatttaaacaacaaaaattagctaagggattagagctagctataaacgctttgaataaccaactcacttcacaacaccaatatccgactaatccttcagaaagtgaatcagcgtcttccagtgatcattattactttgctattttttgggtatttgcagtgatgttcttccctttctggttttttcatcaaggcagtaatttttgtcgcgcatgtaaaagtggagtctgtatttcagcaatctatcttttagatttattcctgttctccgataaaattttttccattgctgtattttccttcttttttactttcaccatatttatggtctttacctgtttatgtgtacttcagaaaagagcatctggtagaagttatcattcagacaacagcggttccgctggaggctcagatagcggcggatttagcggcgggggcggttcttctggaggtggcggcgcatccggccgctggtaactcaaccataaaaaatgccagcccggaggctggcatttttaaatcagataaagtcagtcttatgcctggcctttgatctctttacgaccgttgtacggtgctttttcgcccagagcttcttcgatacgaatcagctggttgtatttagcaacacggtcagaacggctcatagaaccagttttgatctggcctgcagcagtaccaacagccaggtcagcgatggtagcgtcttcagtttcgccagaacggtgagagataactgcagtgtagccagcatctttcgccatcttgattgcagccagagtttcggtcagagaaccgatctggttgaatttgatcaggatggagttagcgatacctttttcgataccttctttcaggatcttggtgttggttacgaacaggtcgtcaccaaccagctggattttgtcgcccagaactttggtctggtatgcgaaaccgtcccagtcagattcgtccagaccgtcttcgatagaaacgatcgggtactgtttggtcagttcttccaggaagtgagtgaattcttcagaggtgaacgctttgttgccttcgccagccagaacgtatttaccatctttgtagaattcagaagctgcgcagtccatcgccaaagtgatgtctttgcccagttcataaccagcagctttaacagcttcagcgataacagccagagcttcagcgttggaacccaggttcggcgcatagccaccttcgtcaccaacagcagtgttcatgcctttcgctttcagaacttttgccaggtgatggaaaacttcagaacccatgcggatggcttctttcacagttttcgcgccaaccggctgaatcatgaattcctggatatcaacgttgttgtcagcgtgctcaccaccgttgatgatgttcatcatcggaaccggcatagagtatttgcccggagtaccgttcagttcagcgatgtgctcgtacagcggcatacctttagcagctgcagcagctttggcgttagccagagatacagccaggattgcgttcgcgccgaatttggatttgttttcggtgccgtccaggtcgatcatgatcttgtcaatgccagcctgatctttagcatctttgccaatcagcgcctgagcgatcgggccgtttaccgcagcaacagctttggttacgcctttacccaggaaacgggatttgtcgccatcgcgcagttccagagcttcacgggaaccagtagaagcacctgacggagcagctgccataccgacgaaaccaccctccagatgtacttcggcttcaacagtcgggttaccacgggagtcgatgatttcacgaccgatgatttttacgattttggacattaggttttcctcaagtcactagttaaactgaaactccagacaaacaacgcgtacccagggtacgcgttgccgctctaacttttttacttacttcgcctgacgtttctggaactcgctggcggctttcacaaagcctgcaaacagcgggtgaccatcacgtggagtagaagtaaactccggatggaactggcaagccacgaaccacgggtgattcggaacttcgatgatctcgaccaactgatcatccccggaacggcccgcaacgcgcagacctgcatcttcaatctgtttcaacagcatgttgttgacttcgtaacggtgacgatgacgctcaacaattgtcggcgcattgtacagctggcgaaccaggctatcgtcaaccaactggcactgctgtgcgccgagacgcatggtaccgccgagatcgctcttctcgctacgaacttcaacgttgccgttttcatcgcgccactcggtaatcagcgccacaaccgggtacttacagtctggcacaaattccgtagagttggcgttctccatgttggcaacatggcgagcgtaatcaattaacgccacctgcatacccaggcaaatgcccagataaggaatattgttctcacgcgcaaaacgcgcggtcgtaatcatgccttctacgccacgatagccgaaaccgccaggtacgaggattgcgtccagacctttaaggatttcaacgccgcgcgtttcaacatcttgtgaatcgatcagtttgatgttgacgctgacacgattcttcagcccaccgtgtttcagtgcttcgatcactgatttataagcatccggcagttcaatgtacttgccgaccataccgatggtgacttcacttaccgggttcgcttcttcgaagataacctgttcccattcggacagattcgcttccgggcagtttaagctgaatcgtttacaaatataatcgtccagcccctgagatttcaacaggcccggaattttatagatggaatcgacgtctttcagagaaataaccgctttttccggaacattacagaacaatgcaatcttcgcacgttcgttcgccggaacagcgcgatctgaacgacaaatcaggatgtcaggctggataccgatggagagcagctcttttacagagtgctgagtcggtttggttttgacttcaccagacgctgccatgtacggcaccagcgtcaggtgcataaacagagtgtgctcacggccaatttcaacagccatctggcgaatcgcttcgaggaacggcaaggattcgatatcacctactgtaccgccgatttctaccagtactacgtcatgaccttcgccaccttccagcacgcgctctttgattgcgttagtgatgtgcggaataacctgcacggttgcgccgaggtagtcaccgcggcgttctttacgcagaacgtcagagtagatacgacccgtggtgaagttgttgcggcggctcattttggtacgaatgaaacgctcgtagtgccccaggtccaggtcggtttcagcgccgtcttcagtaacgaacacttccccgtgttggattgggctcatagtacctggatcgacgttgatgtacggatccagtttcatgatggtcacattgaggccacgggcttcaagaatggctgcgagggaggctgcggcaatgcctttacccagagaggatacgaccccgccggtcacaaaaatatagttcgttgtcatgctgaacctgagaagttaggttgaaaagacgatggaataaccaagacgggaaagcagtatacccgaacatgacctgtgccacaaactttcattatccctcctcttcgccagcgcactattgaaatcaggagtgagaaaatagcccctttggggtaaatgtttttgacgcaaatcaagcgcttgtcatttaaaaaatgacacaaatggcgcttgaccgcgtaattcccttagagatcaatttcctgccgttttacctgttgccagacttcttccattgtttcgaggtcaacacctgtcatttccagtccacgcgcggcaacaatacgctccacttcgcgaaaacgacgctcgaatttttcgttcgctttttgcaatgcgatttctgctttcgtccctaaatggcgagccagattaaccgtggcaaacagcaggtcccccatttcctcctccagtttagcctggtcgacaacagcctgccgcgcttcgtacatcacctcgtcgatctcttcgtagactttatcgactaccggaccaagcgtcgtccaatcgaagccaacgttggcgcaacgtttctggattttttgcgcacgcattaaagccggtaaactacgaggaatatcgtccagcgccgaatgctgcgctttctgcgcgcgctcttcggttttgatttgctcccaacgggcaagcacttcactactgttttcggcagaactatcagcaaaaacatgcggatggcgacgctctaatttatcgctaatagcagcgcaaatatcattaaagtcaaagcgcccttcttcctgagccatttgcgcgtaaaacaccacctggaatagcagatcgcccagttcaccgcgaagatcgtcaaaatcttcacgggcgatggcgtccagcacttcgtaggtttcttcaagggtgtaaggcgcaatggtggcaaatgtctgctctttatcccacgggcagccgttttccggatcgcgcaggcgctgcataatagtgagcaaacggtcgatttgattcattgaattgtcctgaaaattgcgggtctgtcaggtggaaacctgtgaccagaatagaagtgagttagtaacactacccaatcagtacgttaattttggctttaatgagttgtaattcctctggggcaactgttcctttcttcgttgctcctcttgcccgccaggcgatactttttacctgatcagctaacgctacgccatcacgttcctgaccggataaaacaacttcgaacggatatccttttgattgcgttgtacaaggaacacacagacacatacctgttttgttgttgtacatgaaaggactcaggacaacagctggacgatgtccagcttgctcgctaccttttgtcgggtcaaaatcaacccaaatcagatcgcccatatcgggtacgtatcggcttaccattaccagacttccttatctttcggctctccccagtcgatattctcgtggaggttttccggcgtgatgtcgttgaccagttcagcaagcgtaaatacgggctctttacgcactggctcaataattaatttgccatccaccaggtcaatcttcacttcatcatcaatattcagattgagcgcctgcattaacgtagccgggatccgcaccgccggtgaatttccccaacgctttacgctactgtggatcataaccctttcctcaaaccgctatcatatgtagatacagtatatatcaatctacattgtagatacgagcaaatttcggcctaactcccgtgcaaccgacgcgcgtcgataacatccggcacctggttgagtttacccagcacgcgccccagcacttgcaggttgtaaatctcaatggtcatgtcgatggtcgccagttgctgtttggtgtcgctacggctggcaacgccaagcacgttcaccttctcgttggcgagaatggtcgtgatatcacgtaacaacccactacgatcattagctaccacgcggaccaccagcgaatatccggcggagtagctctcaccccataccgcgtcaacaatgcgttctggcgcatgggagcgcagttccgccagttgttcgcaatcggcgcggtgtactgaaataccgcgcccctgggtaatgaagccgacaatctcatctccaggaatcggctggcagcagcgcgcgatgtggtgcatcaggttgccaacaccttcgactaccacgcgaccgttatctttactgcggttttgcggcgtgtagcttttttgctgaagttgcttcagcgcggcggcgtcctgctcttcggcactcggcttattaaattgcgattgcaggaagttcaccatctgattgagacggatatccccgccaccaatcgccgccagcaactcgtcgacatcattgaagttgtaacgcggcagcagatgtttttctgcttctttcaggctgatccccagatgttccagctcgtcgtcaaggatttgccgcccagccagaatgtttttgtcacggtcctgtttacggaaccaggcgtgaattttcgaacgcccacggctggttgtgacgtaaccgaggtttgggtttaaccagtcacggctggggttcggctgtttctgggtgataatttcaatctggtcgcccatctgcagctggtaggtgaacggcacaatgcgcccgccaatttttgccccgatgcagcggtgtccgacatcactgtggatgtggtaagcgaagtccagcggcgttgatcccgcaggcaaatcaacgacatcacctttcggcgtaaagacgtacacccggtcgtcaaagacctgactacgtacttcgtcgagcatttcgccggaatcagccatctcttcctgccacgcaatcagtttacgcagccaggcaatccggtcttcatgtcccgaacgtgcgccgccagcagccgcgccctctttatatttccagtgcgcagcaacacccaactctgcatcttcatgcatctgtttggtgcggatttggatctcaacggtttttccacccggccccagaaccacggtatgaatagactgataaccgtttggtttcgggttagcgacgtaatcgtcaaactcatccggcaggtggcgatagtgagtgtgcactatccccagtgcggcatagcaatcctgtaaacgctcggcgacaatacgtaccgcacgcacatcaaacagctcatcaaaggcgaggttctttttctgcattttacgccagatgctgtagatgtgtttcggacgaccatacacttccgctttaacgccttcagctttcatctcagcgcgcagatgaccaacgaactcttcgatgtagtgttcgcggtcgagacgccgttcatgcagcagtttggcaattcgtttgtattcggttggatggaggtaacggaagcagtaatcttccagttcccatttcagttgtccgattccgagacggttagccagcggtgcgtagatgttggtacactcttttgccgccagtacacgttcatcttccggcgcatcttttacttcgcgcagatgagcaatacgctccgccagtttgatgactacgcagcgaaaatcatcgaccatcgccaataacatccggcgaacgttatcgacctgttcggaggaaacagaatcagtgtgcgtcgctttcagctggcggatcgccgccatatcacgcacgccgtgaataaggttaacgaccgacttaccgacgctctcacgcagcacatcttcgctgactacgttggcatccgccagagggaaaagcagcgccgcccgcagcgtgtcaatgtccatacttaatgtcgagaggatctccaccatctcaacaccacgccacaataacagactggcatccggatgcccctgcgtctgttgcagacaatacgcccaggtttcggctaagcactcacacgacttctggctggtaatacccagacttgcgatccatttttccggatcaaattcaccagccttattgatatgtgcacttcttaccgcaaccatcgtcctctcctttagggaccagacctgccgaaatcggcaaatcgcaactatttaacgcgcgagaaaagtaccatcgattccagatgtcccgtgtgtgggaacatatccagcatcgccagtcgcgcaatggtatatcctgcttttaataacgcttcgctatcccgagccagcgttgcagggttacaggatacataaactatacgaataggttccagttttataatttgctgcataacacctgcggcacctgctcgcgccgggtccagcaacactttatcgaagccgtttttcgcccacggctgctttgtgacatcttcttcaagattttcgtgataaaacgtcacattctgtaagccattaagacgcgcattctgctggcctttttccaccagcgccggaacaccttctacaccgaccacactggcagcttgtgtcgccaatggcagtgtaaagttgcccataccgcagaacagatccagtacgcgatcttcaggttgcacatccagccattccaacgcacgcgctaccattttttggttcacacccgcattgacctgaataaaatcgcgcgggctaaaagttaagcgcaacccgtttgagtcataccagggcatctcaccagagacggtttcgagtatctcactatcgggggcgagatacagatccaggccttcagaatgcgaaaagcgttccagtttttcgcgatctgccgaacttagcggtgcggtatggcgcaaaatcatcagcgtgccgctggttgcctgtaccagttcaacatgaccaagatggcgcatagcttgtaagctgcccagacatgccctgactttgggcagcaatgcttcaagttggggcgctaaaatggggcattgtttgacgtcgacaatgtcactggagcccgctttgcgaaaccccatctgaagttgctgtgttttcggtaagtagttcagacttaaacgcgcgcgacggcgatagccccagggaacatcggcgatcacttcagagacatcgtgtttcattaatcgggcgagtgccgcacttttgcttcgctgctgtaaatccacgctggcgtgttgttgctgacagccaccgcatacgccaaaatgaggacagcgtggcgtttcgcgttccgggctatcgcttaaccggcgtacgactttagcgcgggcatactgttttttatcttcagtaacagtaacttccgcgttttcctgcggcaataatccggggataaatagcgttttgccgttatgtcgcgccacgccctgaccaaaagagtcgaggtcgttgactgaaacggttatgatctgacgcgtcgtcgtgcgtcgttttgcagagtagaattgcgccattggcgagactttctcaatttaacagtgtgaccttaattgtcccataacggaactccatgaccaactacagcctgcgcgcacgcatgatgattctgatcctggcaccgaccgtccttattggtttattgctgagtatctttttcgtcgtgcatcgctataacgacttgcagcgtcaactggaagatgccggtgccagcattattgagccgcttgcagtttctactgaatatggcatgagcctgcaaaatcgcgaatctatcggtcagttaataagcgtactgcatcgtcgccattccgatattgttcgcgcgatttcggtttatgatgaaaataaccgactctttgtcacctccaattttcatcttgatccctcatcaatgcagctcggcagcaacgtgccgtttcctcgccagctcactgtcactcgtgacggcgatattatgatcctccgcacgccgattatttctgagagttactcccccgacgaatcgcccagtagcgatgccaaaaatagtcaaaatatgttgggatatattgcgctggagctggatcttaaatcggttcgcttgcagcaatataaagagatctttatttccagcgtgatgatgctgttttgtatcggtattgcgcttatttttggctggcgcttaatgcgcgatgtaaccggtccgattcgcaacatggtgaataccgtcgaccgcatccgtcgcgggcaactcgacagccgggtggaaggatttatgctcggcgagctggatatgctgaaaaacggtatcaactcgatggcaatgtcgctggctgcttatcacgaagagatgcagcacaatatcgaccaggcgacgtccgatctgcgtgaaacgctggagcagatggaaattcagaacgttgagttagatctggcgaaaaagcgcgcccaggaagcggcgcgtattaaatccgagtttctggcaaatatgtcacacgagctgcgtacaccactgaatggtgttattggctttacccgcctgacgctgaaaacagaattaacaccaacgcagcgcgatcacctgaatacgattgaacgttcggcaaataatttgctggcaattattaatgatgttctcgacttctcgaaactggaagcaggtaagctgattctggaaagtattccattcccactacgcagcacgctggatgaagtcgttactctgctggcacattcttctcacgataaagggttagaactgacgctcaatattaaaagcgacgtgcctgataacgtgatcggcgacccgctgcgattacagcaaatcatcactaacctggtggggaatgcaattaaattcaccgagaatggcaacattgatattctggtagaaaaacgtgcgctgagtaataccaaagtgcagattgaagtgcagattcgggataccggcattggtattcctgaacgcgatcaatcgcgcttattccaggccttccgacaggctgatgccagtatttcccgccgtcatggtggcaccgggctggggctggtgattacacaaaaactggttaatgaaatgggcggcgatatttcgttccatagccagccgaatcgcggttcaactttctggttccacattaatctcgatctgaacccgaacattattatcgaagggccatccacccagtgcctcgcaggtaagcgcctggcctatgtcgaaccaaactccgcagcagcgcaatgcacgctggatattttaagtgaaacgccgctggaagtggtttatagcccaacgttctccgcgctgcctcccgcgcattacgacatgatgttgttaggcatcgcggtgaccttccgcgagccgctaacaatgcaacatgagcgattagcgaaagcggtatcgatgaccgatttcctgatgctggcacttccttgccatgcacaagtcaatgctgaaaaactcaagcaagatggtatcggcgcgtgtctgctgaaaccattaacacctacacgcctgttgcctgccctgacggaattttgtcatcacaaacaaaacacgcttttgcctgtaaccgatgaaagtaagctggcaatgacagtcatggcggttgatgacaaccccgctaacctgaaacttatcggcgcattgctggaagatatggtgcaacatgtggaactttgcgatagcgggcatcaggcggttgaacgggcgaaacagatgccgttcgatttgatcttaatggatattcaaatgccggacatggatggcattcgggcctgcgaactcatccaccaactcccgcatcagcaacaaacgccggttatcgcggtaacggcgcatgcaatggccgggcaaaaagagaagctgcttggcgcagggatgagcgattatctggcgaaaccgattgaagaagagcgattgcataatttgttgttgcgctacaagcctggcagcggtatttcctctcgcgtcgtgacgcccgaagtcaacgaaattgtggtgaacccgaatgcgaccctcgactggcaactggcactacgccaggcagcaggaaaaaccgatttagcgcgcgatatgctgcaaatgttactcgatttcctgcctgaagttcgcaacaaagttgaggaacagctggttggagaaaacccggaaggcctggttgatttgattcataaactgcatggcagttgcggctatagcggtgtgccacgtatgaagaatctctgccaactgatcgaacaacagctacgtagcggtactaaagaagaagatttggaaccggagctgctggaactgttggacgagatggataatgtcgcgcgcgaagccagcaaaattctcgggtaatggatgtcttgtcgagtagcaatcggctttttatgacgctggtttcagattggtgacaaagtgcctgtgtttatgccggatgcggcgttaacgccttatccggcctacaaaaccaattaaattcaatgaattaaaaaatgatgtagacctgatacatagcacaacaggctattttgcgtttagcatcagtctcaaaccggctccagatagagccggttttggttttctgtcttaacgcaccatgcacgggcgcttgttatcgaacgtccagccaggaatcagatactgcattcccatcgcatcgtcacgcgcgccaagcccgtgtttctgatacagctcatgggctttcatcacttgatccatatcgatttctacacccagccccggtttttctggcacctgtaccagcccgcctttgatctcaaacggttctttggtcaggcgctgattgccttcctgccaaatccagtgcgtatcaatagcagtaattttacccggtgcagcggcggcaacatgggtaaacatcgccagggaaatatcgaagtggttgttagagtgtgaaccccaggtcaggccaaattcatggcacatttgcgccacacgtaccgaaccttgcattgtccagaaatgcggatccgccagcgggatatcaacggattgcagggagagcgtatggcccatttgccgccagtcggtggcgatcatattggttgcagtcggtagacctgtcgcgcgacggaactctgccatcacttcacgcccggagaaaccttgctccgcaccacacggatcttctgcataagccagcgaacctttcaggtatttaccgattttaatcgcttcgttcagcgaccaggcaccgttaagatcgagcgtaatacgcgcctgcgggaagcgttgcgccagtgccacaatagactcggcctcttcttccccggccagtacaccgcccttcagtttgaaatcgttgaagccatatttttcatatgccgcttccgccaggcgcaccaccgcatccggcgtcatcgcttcttcatgacgcaggcgataccagtcgcatgagtcatccggctggctttgatacggcagcggcgtggctttgcgattaccgacgaagaacagataaccgagcatttcgacttcgctacgctgttgaccatcgcccagcagcgatgccacgtttacccccagatgctgccccagcagatccagcattgccgcttctatcccggtaactacatgaatagtggtacgtaggtcaaatgtctgcaaaccgcgcccaccagcatcacgatcggcaaaagtattacgcaccagcgtcagaacgtttttgtattcacccagcgttttacctaccaccagcggaatcgcatcttccagcgttttacggattttctcgccgccgggaatttcccctacgccagtgtgaccagaattatctttgataatcacaatattacgcgtaaagaacggtgcgtgtgcaccactcagattcatcagcatactgtcatgacccgccaccgggataacctgcatttcagtaacaacaggcgtcgtaaattgagaactcatatttatgtcctttttcagaatcaatgacggccgaaaacgggacgtttacggtcaaaggtccagccggggatcaggtactgcatcggacctgcgtcgttacgcgcaccgccaggcagacgtttataggcctcatgtgccttttgtacctgttcccagtccagttccacgcccagaccgggcgcatcaggaacggcaatttttccgtttttaatctccagcggattttgggtcaggcgacaatcgccctcctgccaaatccagtgggtatcgatagcggtaggattacccggtgccgccgcgcccacatgggtaaacatcgccagagagatatcgaaatggttattagaatggcagccccaggtcagcccccagtcgtcgcaaagctgcgccacacggactgcaccggaaagcgtccagaagtgcggatcggcaagtggaatatctaccgcattgagcatcaccgcatgacccatttcgcgccagttggtggcgatcatattagtcgcgacgggcaagccggtcgcccgtcgaaattccgccatcacttcacgtccggagaagccctgttctgcgccgcatggatcttcggcataggtaagaacatcattcagccctttgcataaagaaatggcttcatcaagcagccatgcaccgttgggatcaacggtaatccgcgcatccgggaagcgtttcttcaatgcacgaacagtgtcgatttcttgctcgccaggtaacacgccgcccttaagtttgaaatctttaaagccgtagcgatcctgtgaggcttccgccagacgcacaacggcttcgctgttcattgctttctgatgccgcaactgataccactcatggttgcccggcgtattttccacataaggaagatcggttttggtccgatcaccgatataaaacagataaccgaggacggtaatagcctcgcgttgcttgcctggccctaacagttcgcagaccggaacattcagcgccttacctagcaggtcaagcaaagcggcttccagcgccgccacggcgttaacgcgtaattcaaaggtccaggcacctttaccgaaggtatcaaaatcggcggcctgattacctttatgcacctgctggaccactttattcagtcgcgcaacttcctggcccagaaccatcggaatagcatcgacaagcgtctgataaatcacatctccgcccggcgcttcaccaatgccggtatgcccggcgttatcggtgagtaccacaatattgcgggtgaaatatgcgttatgtgccccaccaatattaagcaacatgctgtcatgcccggccaccggaatgactttcatatcagtaataacaggactggattgtgtcgccatcttattgccccgcaacaggtttcaactcgatacgcttgatatcgcccaccagcaccaggtagctcagtaccgcgattaaggcatgaacaccaacataaatcagcgccccattaaacgagccagtcgtgccaacgatataaccaattgcgattggcgtgacgatgccagaaatgttaccgaacatgttgaacaggccaccggaaagaccgctgatctcttttggcgcggtatctgccattactgcccaacccagcgccccgatgcccttaccgaagaaggccagcgccataaagccgatgatcatccactcaacgttgacgtagttgcagaacaccatcaccatcgacagcaacatgcccattacgatcggtgttttacgcgcaatgttcagcgatcccgtgcggcgcatcagccagtcggaaataatcccacccagcacaccgccgataaaaccgcaaaccgccggaacggaagccacaaagcccgctttcagaatcgacatcccgcgtgcctgcaccagataaaccgggaaccaggtaataaagaagtaagtcagggcgttgatacagtactgaccgatataaacgccgatcatcatccgtgaccctagcagctgtttgatctgcccccacttcacgctgaacggcactttaactttggtgttttgctgatccatattgatcagcgcaccacccgcggcgatgtactccagctctttcttatttacccccggatgttgatttggctcgtggatgactttcaaccagataaagctgatgacaatccccagaccgcccataaagaagaagacgtgtgaccagcccacttcatgcgtcagccagcccataatcggcgcgaagatcaccgttgcgaagtattgagcggagttaaaaatcgacaccgccgttcccctttcctgcgccggaaaccaggccgcaacaatgcgactgttgccggggaaagatggcgcttcagcaagcccgaccaggaagcgcagcgtaaacagggcaacgataatgccgaatccactaaagatatcgacgaagccttgcagcaaggtaaacatcgaccagataaagatcgaccagaagtagacgcgttttgaaccaaaacggtccagcaaccagccaccagggatctgcccgataacataagcccatgagaaagcagagaacacatagcccattcccacgggatcaaggccgatatctttggccatttccgaaccggcgatagagagcgtagcgcggtcgccgtagttgaaggatgtgacgataaacaacatcaccactatccagtaacgagcatttgtgcgtttttccacactgctcgcagcctgacttaaagaactcattgttgcactcctgaaaattcgcgttagccacgctcactctggactgcgacatcgccaggaaatcagaggtgacgtagggtgttttttgccgtttttataggtcgttcgccgaatacggcgcgtgtttatatctggcaatagcagtataaaaagcgcgccatagcggctcaccgtgcaacaacacaacattaatgcgttcaatgaggcccgattttggcattagccctggacggtggaatccacttcacggaaatgaaaacaagaacaagaaaggaagggttaaaacgaagaaataaagaagagtatgaaatggatcgcttgactccaggcaaacgccagtaaaaatccgcgctatgaagcagtttttactggcatttgcctgaaaagattcgattcagcaccgctaaaacgacatttaccgctcgctgaacatatcaggacaacagcgtgccccactgttcgacccacggatttgattccgtttccggttccgggttctcactggcgtcaatcaacagcatttcgccaacccgctgagcgctctgttcctgcaacaaggcatcgaactgtttgccgccattgcagaaattcacataactactgtcgccgagcgcaatcacgccataacgcagattcggctggaagcccagactatctttgattccctgaaagagtggcacaatgctatcaggaaggtcgccctgcccggtcgtggacgtaaccaccagaacatacttatcctgatagggcagccagtcgcttaattcaggatcttcaaataccgttgctttgtggccctgcgcggtcagaatcgcttccgcttcttcggccactaacagtgaattcccgtacatggtgccgacaaaaataccaatttccgccataccgttttctccctggattaggaacttatctctccatcctgacccgatggcgcactgaactcaaccctttcattttcaggaagcagaccgcgccagccaaattgtgataacgcctgcatccaggtgtcgtccaggcccgcgtgaatagtcagcggctcgccagtaaaaggatgcgtcaatgacaactgactggcatgtagcattaaccgctggaggccaaaatgctcagcaccgctgcgattctggcgtaaatcgccatgtttgctatcgccaataatcggatgacgcaaatgggcaagatgtcggcgaagctgatgtttgcgtccggttttcggctccagttccaccaggccgtagcgcgtggtcgggtaacgtccggtcgctaccggcatttctacggtcgccagaccgcgataatgcgtcactgctggctgcgggcctttatcttcgcgggcaaatttatcagcgattttgtccagttcttccaccagtggataatccagcaccgcttcttccatcaaccagccgcgcacaatcgcatggtaacgtttctggatttggtgctgttcaaactgttgtgccagcagccgtccggcctcgctggataatcccatcaacaacacaccagaagtgggtcggtccagacgatgagcagtaaaaacatgctggcctatctggtcacgcacggtttgcatgaccactactttctcgtcgcgatccagccagctgcggtgaaccagccagccggagggtttatttaccgcaaccagccattcatcctgatagagtatttccagcattagctcgcatcatccgcaaaaagagcatccagtttttccagctcagccagaataagcgcgcgttgcggatggtccgtcgccagcgccatttcataatagggtgcaacggcaaaagcgcccggtaacggctgtttgttatctaacaaatcgtgcattcgcgggatcagcacccactgcaaccactccagtggttccatggtgtccataaagaacggttgggtactattaaattgatgcggctggggttcatcgtttcgccagtgctgatgttcacgcagtaacgcttcaagcgcctgcaactggagacgaacgcggtcatgagtggtcataaagcaacctcaataagaaaaactgccgcgaaggatagcaggaataaaaaaagggagcactgtattcacagcgctcccggttcgtttcgcagcattccagctacttttgttgctccctgctcatccttgacaacttttcctctggccttgcggccaatcgttcatcctgaactattgcttcctgctcacaccaccccgatgtgatacttcatcctgaagtgtccctggccttcctgacccaccgaatcatcctgaccggttctcattctccatcctggaggtgtcctttaacgcgtcctgcgtcatcctcttcgcttcatccagaagcctttccctgaaacaccatcctggtgtgtcctgcagaagtgtcatcatcctgatgttcacttcgttgtctgactccctgtcgacgaagatagaatcgtctttttcgcgaagtcttacaaggcgcttacagacaatgccttaaggaaaatttcatatgaaagttaagaattaacaatcaacattttgattttaaatgaaaataacgattcttatctttttaagtattcgcttatttcctggcgatctcctacagagtctgtaagagatctctcacaaccagatggggtatttggattacagaagaggcttaagttgattaaggaattccgcaagatttgaggctaaatgcgtccgtttacgtgttcccagcgtctctttgcacacttcaccggagagattacacaccgagatgacctctaactcttcttccagcgtcgcgataaatagtgtgggcggcagttttagccttttctgagtcaccagatgaccaatcagattttcctgcacccgacggaagtcgtcttcactccaggtttgcagcaatgtcagtttgatatcgccaaactgcgcgtgcatatccccggcaaactgagtcgtataaaaggtatgaattgtgggttgtatcacaatatcaaaagcgcgttcaaccgcgtttacattttgttccccggtaaacggctggggttgccagtatacggcatcttcggtagttgaaataatgcacggtgaaggaacaccgtacagttcctcacttaacggccagcttttatgctcttcatgccacgcatcgcagtagcgtgcagtaaaatctttcagggcttgtgcggtcaaatcgtccactaatttctctcttcacttaaaccagatacacttgtcgtttagtttatctggtttatgacggtgaaacatgtcttcttatgcaaaccatcaggcacttgcgggcctgactcttggaaaatcaaccgattaccgggatacctatgacgccagcctactgcaaggcgttccacgcagcctgaatcgcgacccgctgggtctgaaagcggataacctgccttttcacggtacggatatctggacgctgtatgaactttcctggctgaatgcgaaaggtttgccgcaggtcgctgtcggtcatgttgaacttgattacaccagcgtaaatctgattgagtcgaagagttttaagctctatctcaacagttttaaccagacgcgttttaataactgggatgaggtgcgccagacgctggagcgcgacttaagcacttgcgctcagggtaagattagcgtggcgttatatcgtcttgatgaactggaaggccagccgataggtcattttaatggcacttgcattgatgaccaggatatcactatcgataactatgaattcactactgactatctggagaatgccacctgtggtgaaaaagtagtggaagagacgcttgtcagccacctgctgaaatcaaactgcctgatcacccatcaaccagattggggttcgctccaaattcagtatcgtggacgccaaattgacagagaaaaactgctgcgttacctggtctcattccgtcatcacaacgagttccacgaacagtgcgtggaacgcatctttaatgacctgttacgcttctgccagccagaaaaattgagcgtttacgcacgttatacccgtcgtggcggtctggacattaacccgtggcgcagtaatagcgattttgtcccatcgaccacaagactggttcggcaataaattttttctcaattttgcgtgctggattcacgcagaaggttgtgaaaggtcatcaggcagggctattgtaatcaaagggaatgacgatattcgtcccataaggagtttttcttgattacacatattagcccgcttggctccatggatatgttgtcgcagctggaagtggatatgcttaaacgcaccgccagcagcgacctctatcaactgtttcgcaactgttcacttgccgtactgaactccggtagtttgaccgataacagcaaagaattgctgtctcgttttgaaaatttcgatattaacgtcttgcgccgtgaacgcggcgtaaagctggaactgattaatcccccggaagaggcttttgtcgatgggcgaattattcgcgctttgcaggccaacttgttcgcggtcctgcgtgacattctcttcgtttacgggcaaatccataacaccgttcgttttcccaacctgaatctcgacaactccgtccacatcactaacctggtcttttccatcttgcgtaacgctcgcgcgctgcatgtgggtgaagcgccaaatatggtggtctgctggggcggtcactcaattaacgaaaacgagtatttgtatgcccgtcgcgtcggaaaccagctgggcctgcgtgagctgaatatctgcaccggctgtggtccgggagcgatggaagcgccgatgaaaggtgctgcggtcggacacgcgcagcagcgttacaaagacagtcgttttattggtatgacagagccgtcgattatcgccgctgaaccgcctaacccgctggtcaacgaattgatcatcatgccagatatcgaaaaacgtctggaagcgtttgtccgtatcgctcacggtatcattatcttccctggcggtgtgggtacggcagaagagttgctctatttgctgggaattttaatgaacccggccaacaaagatcaggttttaccattgatcctcaccggcccgaaagagagcgccgactacttccgcgtactggacgagtttgtcgtgcatacgctgggtgaaaacgcgcgccgccattaccgcatcatcattgatgacgcagctgaagtcgctcgtcagatgaaaaaatcgatgccgctggtgaaagaaaatcgccgtgatacaggcgatgcctacagctttaactggtcaatgcgcattgcgccagatttgcaaatgccgtttgagccgtctcacgagaatatggctaatctgaagctttacccggatcaacctgttgaagtgctggctgccgacctgcgccgtgcgttctccggtattgtggcgggtaacgtaaaagaagtcggtattcgcgccattgaagagtttggtccttacaaaatcaacggcgataaagagattatgcgtcgtatggacgacctgctacagggttttgttgcccagcatcgtatgaagttgccaggctcagcctacatcccttgctacgaaatctgcacgtaatctccgctcccccggtgacgtttgttgccgggttttctcgtttttggtcacttactcatcaactcatttcatttgttatatgaatgtttcttaccaccctcacgcgacaaatatcatcacagttaatatgtcattcaatttatgttgcaacgcaaacgtttccctattttcataaaccgtattttatcgctatgaaaaagaaattatcgccatgattaactaaaagtattgattttttcagttcaacctacatatattgcgcgccccggaagaagtcagatgtcgtttaatgggcaaatattgcccttaaattctcttttacttttgatttacagagtaaagcgttgggataatctatcttccaagtagattattgtatttgagatcaagatcactgatagatacataacttgtgtgtatctttccgccctcaaattattacggcggtaaatgattaagccatcgccgatagacagatttcatttttacggtcaggcaccttcccgggctgaactggctaaaagctgaattatttgcattcctccaggagaaatagatggaaacgactcaaaccagcacgattgcgtcgaaagactctcgtagtgcctggcgcaagacagacaccatgtggatgctgggcctttacggcacggcaatcggcgcgggcgtgctgttcctgccaatcaacgccggtgttggcggtatgatcccgctgatcatcatggctatccttgcgttcccgatgacgttttttgctcaccgcggcctgactcgcttcgtactgtctggtaaaaacccgggcgaagacatcaccgaggttgtagaagaacactttggtattggcgcaggtaaactgattaccctgctctacttcttcgctatctacccgatcctgctggtttatagcgtggcaatcaccaataccgttgaaagcttcatgtctcaccagctgggtatgacgccaccgccgcgtgcgattctgtcgctgatcctgatcgtgggtatgatgaccatcgttcgcttcggtgagcagatgatcgttaaagcgatgagtattctggtattcccgtttgttggcgtactgatgctgctggctctgtacctgatcccgcagtggaacggcgctgcactggaaacgctgtctctggacactgcatctgcaaccggaaacggtctgtggatgaccctgtggctggcaattccggtaatggtgttctcgttcaaccactctccgatcatctcttctttcgccgttgcgaagcgtgaagagtacggcgatatggcagaacagaaatgctcgaagatcctggcattcgcacacatcatgatggtgctgaccgtaatgttcttcgtcttcagctgtgtactgagcctgactccggcagacctggctgcggctaaagagcagaacatctcgattctgtcttacctggctaaccactttaacgcaccggttatcgcgtggatggctccgattatcgcgattatcgctatcaccaaatccttcctcggtcactacctgggcgcacgtgaaggcttcaacggtatggtgattaaatctctgcgtggtaaaggtaagtctatcgaaatcaacaagctgaaccgtatcactgcgctgttcatgctggtaacgacctggattgttgccaccctgaacccgagcatcctgggtatgattgaaaccctgggcggtccaatcatcgcgatgatcctgttcctgatgccgatgtacgcaattcagaaagtaccggcaatgcgtaagtacagcggtcacatcagcaacgtattcgttgtcgtgatgggtctgattgcaatctccgcaatcttctactctctgttcagctaagtcctttcgcgccgctttcgggcggcgcttcctccgttttaacgcgatgtatttcctatgattagcgtattcgatattttcaaaatcggcattggcccttccagttctcataccgttggaccaatgaaagcgggtaaacaatttaccgacgatctgattgcccgtaacctgcttaaagacgtgacccgcgtggtggttgacgtgtacggctcgctctctctgaccggtaaaggccaccacactgatatcgccattattatgggcctggcgggtaacctgccggataccgtggatatcgattccatccccagttttattcaggatgtgaatactcatggtcgcctgatgctggcaaacggtcagcatgaagtggagttcccggttgatcagtgcatgaacttccacgccgacaacctttctctgcatgaaaacggtatgcgcattaccgcgctggcgggcgataaagtcgtttacagccagacttactactctattggcggtggctttatcgttgatgaagagcattttggccagcaggatagcgcaccggttgaagttccttatccgtacagttcagcagccgatctgcaaaaacattgtcaggaaaccgggctgtcactctctggcctgatgatgaaaaacgagctggcgctgcacagcaaagaagagctggaacagcacctggcgaacgtctgggaagtcatgcgcggcggtattgagcgcggtatttccaccgaaggcgtgttgcctggcaaactgcgcgttccacgccgtgctgcggcactacgccggatgctggtcagccaggataaaaccaccactgacccgatggcggttgttgactggatcaacatgtttgcactggcagtgaacgaagagaacgctgctggcggtcgcgtggtgactgcgccgactaacggtgcgtgcgggattatcccggcagttctggcgtactacgacaagtttatccgcgaagtgaacgctaactcactggctcgttacctgctggtagccagcgccattggttctctttataagatgaacgcgtcgatttctggtgctgaagtgggttgccagggtgaagttggcgtggcgtgctcaatggcggcggctggtctggcagaactattaggcgcaagcccggcgcaggtgtgcatcgcggcggaaatcgccatggagcacaacctcggtctgacgtgtgacccggtcgccggacaggtacaggtgccatgcatcgagcgtaacgccattgcggcagtaaaagcggtgaacgccgcacgtatggcgctgcgccgtaccagcgagccgcgcgtctgcctcgataaagttatcgaaaccatgtacgaaacaggtaaagatatgaacgccaagtaccgcgaaacctctcgcggcggcctggcaatgaagatcgttgcctgcgattaatcgctctccagaggcctcgttttgcgaggcctcttcccgatttctcatccagccgtagcctgttccggcatcgaatgttacccttatcgcctgatctttaagggggttatcgtggctgttcatttgcttattgtcgatgcactgaatcttattcgtcgcattcatgccgttcaggggtcgccctgtgtcgaaacctgccagcatgcgctcgatcagctcattatgcacagccagccaacccacgcggtcgccgtttttgatgatgaaaaccgcagtagcggctggcgtcatcagcgtttaccagattacaaagcgggtcgaccgccaatgccggaagagttgcacgacgagatgcctgcattacgcgccgcctttgagcaacgcggcgtcccgtgctggtcaaccagcggcaacgaagccgatgacttagccgccacgctggcggtcaaagtgacacaggccgggcatcaggcaacgattgtttcgacagataaaggctactgtcagttactttcaccgacattacgtattcgtgattacttccagaaacgttggctggatgcgccatttatcgataaagaatttggcgttcaaccgcagcagttgcccgattactggggacttgcggggatcagcagttcaaaggtaccgggtgttgcgggaatcggaccaaaaagcgccacgcagctgctggtcgagtttcagagtctggaagggatatatgagaatctggatgcggttgccgaaaagtggcgcaaaaaattagaaacccataaagagatggcgtttctgtgccgcgatattgcccgcttacaaaccgatttgcatatcgacggcaatttacagcaattgcggttggtacggtaacggcgagccggatacgccgcaaacgtcgtatccggcattatcacatcagcgcatttaccaggcggtatggtaaagctctacaatatcctcaagcgttgcttcacgcgggttgccaccggtacaaacatcatccagtgccgcctgcgccagtgccggaatgtcttccttgcgtacaccaacatcacgcaaatgtggcggaataccgacatcacggttgagagcaaacaccgcttcaacagcggcattacgcgcctcttccaggctcataccttccactttcacgcccataacgcgcgcgatatcgcggtacttctcaccggtaaagtcagcgttataacgcatgacatgcggtaacaggatggcgttcgcaacaccgtgtggagtgttataaaacgcgcccagtggatgcgccataccatgcaccaaccctaacccaacattcgagaagcccatacccgcaacatactgcccgagcgccatttcttctccggcatccttatcaccagcaaccgatcctcgcagcgccccagcaatgatttcaatcgctttaatgtgcagtgcatcggttagcgcccacgcgccacgggtaatatacccctcaatagcatgagtgagcgcatcgacacccgtcgcagctttcagcgctggaggcataccatccatcatgtcagcgtcaataaacgccacctgcgggatatcatgcggatcaacgcaaacaaacttgcgccgtttctcttcgtcagtgatcacgtagttaatggtcacttctgccgcagtacctgctgtggtaggaattgccagaatcggtacactgggtttattggtcggggaaagcccttccaggctacgcacatcggcaaactccgggttgttgctgataatgccaatcgctttacaagtatcctgtggagaaccaccaccaatagcgatcaggtaatccgcgccgctattctggaatacaccgagcccttctttgacgacagtaattgttgggttgggcactacgccgtcgtaaatcgcccatgccagccctgcagcatccatcttatcggtcactttcgccaccacgccgcattgcaccagcgttttatcggtgacgatcagcgccttctgataaccacggcgtttcacctcatcggttaaagccccaacagcaccccgaccaaaccatgccgtttcgttcagaatcattctgttagccatcatccttctccttgttgctttacgaaattactcttcaattcgtaacccataggttttgaatttctccagcactacggcaatctcttcatcgctcagcactggcaccgggtccgtaatcgccagggtcgtcaggtaaagttgcgccagcacttcaacttcatgcgccagccataacgctttttccagattcacctcacaagcgataagcccatgatgttgtaacaaagttgccttacgatttttgagagccagcgcaacatgttcagaaagttcgcgtgttccaaaggtcgcataaggcgcgcaaggaatagaattaccgccagccgccgcaatcatgtagtgaatagcggggatcgatcggttaagaatggaaactgccgtgcaatgaacggcatgattgtgaacaaccgcgttggcatccggtctgctttgataggctgccatatggaaacgccattcgcttgaggggagctttccttcctcatgtttaccgttgccatcaataaagacaatatgcgactccgtcagtttttcatatggaatgcctgtaggcgtaatcagcatcccatcctgataacgtacactgacgttccccgctgtcccctggttcagtcccaggcgggtcatttccaggcaagtgtcaataatctgacgagcaagtttatttcgttccattagctacctctctctgattcaaaacagggcaataatgttgttcctttcacactattgaattagccgtttaattacccaccatcttcttcctgattaacaagaaagaaattcacaagcttatattttgtgacctggttcaactaatcacagtaaataactgcaagttctctttttataaccccattaaaaatgaccgctcttaaaaatatttatcaaaacggtcatttttctattcctccaagcccggaatgaccgttttcggcacaaacaattaatacggtcatctgatttgtgttttttatgatttattttctgaaacgggcatgaaatttcgattattaaagtgatggtagtcacataaagtcaccttctagctaataagtgtgaccgccgtcatattacagagcgttttttatttgaaaatgaatccatgagttcatttcagacaggcaaatattcactgatatgaagcccgaactcgctggttttgcacttttgaaaacataaccgattacgtgcttaagcttctgaacctaagaggatgctatgggaaacacatcaatacaaacgcagagttaccgtgcggtagataaagatgcagggcaaagcagaagttacattattccattcgcgctgctgtgctcactgttttttctttgggcggtagccaataaccttaacgacattttattacctcaattccagcaggcttttacgctgacaaatttccaggctggcctgatccaatcggccttttactttggttatttcattatcccaatccctgctgggatattgatgaaaaaactcagttataaagcagggattattaccgggttatttttatatgccttgggtgctgcattattctggcccgccgcagaaataatgaactacaccttatttttagttggcctatttattattgcagccggattaggttgtctggaaactgccgcaaacccttttgttacggtattagggccggaaagtagtggtcacttccgcttaaatcttgcgcaaacatttaactcgtttggcgcaattatcgcggttgtctttgggcaaagtcttattttgtctaacgtgccacatcaatcgcaagacgttctcgataaaatgtctccagagcaattgagtgcgtataaacacagcctggtattatcggtacagacaccttatatgatcatcgtggctatcgtgttactggtcgccctgctgatcatgctgacgaaattcccggcattgcagagtgataatcacagtgacgccaaacaaggatcgttctccgcatcgctttctcgcctggcgcgtattcgccactggcgctgggcggtattagcgcaattctgctatgtcggcgcacaaacggcctgctggagctatttgattcgctacgctgtagaagaaattccaggtatgactgcaggctttgccgctaactatttaaccggaaccatggtgtgcttctttattggtcgtttcaccggtacctggctcatcagtcgcttcgcaccacacaaagtcctggccgcctacgcattaatcgctatggcactgtgcctgatctcagccttcgctggcggtcatgtgggcttaatagccctgactttatgcagcgcctttatgtcgattcagtacccaacaatcttctcgctgggcattaagaatctcggccaggacaccaaatatggttcgtccttcatcgttatgaccattattggcggcggtattgtcactccgatcatgggttttgtcagtgacgcggcgggcaacatccccactgctgaactgatccccgcactctgcttcgcggtcatctttatctttgcccgtttccgttctcaaacggcaactaactgaacatattttccgaataaagtgaggaatctgtaatgaaaaaaatcagcttaccgaaaattggtatccgcccggttattgacggtcgtcgcatgggtgttcgtgagtcgcttgaagaacaaacaatgaatatggcgaaagctacggccgcactgctgaccgagaaactgcgccatgcctgcggagctgccgtcgagtgtgtcatttccgatacctgtatcgcgggtatggctgaagccgctgcttgcgaagaaaaattcagcagtcagaatgtaggcctcaccattacggtaacgccttgctggtgctatggcagtgaaaccatcgacatggatccaacccgcccgaaggccatttggggctttaacggcactgaacgccccggcgctgtttacctggcagcggctctggcagctcacagccagaaaggcatcccagcattctccatttacggtcatgacgttcaggatgccgatgacacatcgattcctgccgatgttgaagaaaaactgctgcgctttgcccgcgccggtttggccgtcgccagcatgaaaggtaaaagctatctgtcgctgggcggcgtttcgatgggtatcgccggttccattgttgatcacaacttctttgaatcctggctgggaatgaaagtccaggcggtggatatgaccgaactgcgtcgccgtatcgatcagaagatttacgacgaagccgaattggaaatggcactggcctgggctgataaaaacttccgctatggcgaagatgaaaataacaaacagtatcaacgtaatgccgagcaaagccgcgcagttctgcgcgaaagtttactgatggcgatgtgtatccgcgacatgatgcaaggcaacagcaaactggccgatattggtcgcgtggaagaatcacttggctacaacgccatcgctgcgggcttccaggggcaacgtcactggaccgatcaatatcccaatggtgacaccgccgaagcgatcctcaacagttcatttgactggaatggcgtgcgcgaaccctttgtcgtggcgaccgaaaacgacagtcttaacggcgtggcaatgctaatgggtcaccagctcaccggcaccgctcaggtatttgccgatgtgcgtacctactggtcaccagaagcaattgagcgtgtaacggggcataaactggatggactggcagaacacggcatcatccatttgatcaactccggttctgctgcgctggacggttcctgtaaacaacgcgacagcgaaggtaacccgacgatgaagccacactgggaaatctctcagcaagaggctgacgcttgcctcgccgctaccgaatggtgcccggcgatccacgaatacttccgtggcggcggttactcttcccgcttccttaccgaaggcggcgtcccgttcaccatgactcgtgtcaacatcatcaaaggcctgggaccggtactgcaaatcgcggaaggctggagcgtggaattgccgaaggatgtgcatgacatcctcaacaaacgcaccaactcaacctggccaaccacctggtttgcaccgcgcctcaccggtaaagggccgtttacggatgtgtactcggtaatggcgaactggggcgctaaccatggggttctgaccatcggccacgttggcgcagactttatcactctcgcctccatgctgcgtatcccggtatgtatgcacaacgttgaagagaccaaagtgtatcgtccttctgcctgggctgcgcacggcatggatattgaaggccaggattaccgcgcttgccagaactacggtccgttgtacaagcgttaatacattactccctgatgtgatgcccggtcgctccggctaccgggcctgaacaagcaagagtggttagccggataagcaatgttatccggctatattgcaggagcgattatgaaacaagaagttatcctggtactcgactgtggcgcgaccaatgtcagggccatcgcggttaatcggcagggcaaaattgttgcccgcgcctcaacgcctaatgccagcgatatcgcgatggaaaacaacacctggcaccagtggtctttagacgccattttgcaacgctttgctgattgctgtcggcaaatcaatagtgaactgactgaatgccacatccgcggtatcgccgtcaccacctttggtgtggatggcgctctggtagataagcaaggcaatctgctctatccgattattagctggaaatgtccgcgaacagcagcggttatggacaatattgaacggttaatctccgcacagcggttgcaggctatttctggcgtcggagcctttagtttcaatacgttatataagttggtgtggttgaaagaaaatcatccacaactgctggaacgcgcgcacgcctggctctttatttcgtcgctgattaaccaccgtttaaccggcgaattcactactgatatcacgatggccggaaccagccagatgctggatatccagcaacgcgatttcagtccgcaaattttacaagccaccggtattccacgccgactcttccctcgtctggtggaagcgggtgaacagattggtacgctacagaacagcgccgcagcaatgctcggcttacccgttggcataccggtgatttccgcaggtcacgatacccagttcgccctttttggcgctggtgctgaacaaaatgaacccgtgctctcttccggtacatgggaaattttaatggttcgcagcgcccaggttgatacttcgctgttaagtcagtacgccggttccacctgcgaactggatagccaggcagggttgtataacccaggtatgcaatggctggcatccggcgtgctggaatgggtgagaaaactgttctggacggctgaaacaccctggcaaatgttgattgaagaagctcgtctgatcgcgcctggcgcggatggcgtaaaaatgcagtgtgatttattgtcgtgtcagaacgctggctggcaaggagtgacgcttaataccacgcgggggcatttctatcgcgcggcgctggaagggttaactgcgcaattacagcgcaatctacagatgctggaaaaaatcgggcactttaaggcctctgaattattgttagtcggtggaggaagtcgcaacacattgtggaatcagattaaagccaatatgcttgatattccggtaaaagttctcgacgacgccgaaacgaccgtcgcaggagctgcgctgttcggttggtatggcgtaggggaatttaacagcccggaagaagcccgcgcacagattcattatcagtaccgttatttctacccgcaaactgaacctgaatttatagaggaagtgtgaaatgctgaaaacaatttcgccgttaatttctcccgaactattgaaagtgctggcagagatgggacatggagatgaaattattttttccgatgctcactttcccgcccattcgatgggaccgcaggtgatccgcgctgatggcctgttggtgagcgacttgctccaggcgattatcccgttatttgaactggacagttatgcaccgccgctggtgatgatggcggcggtagaaggtgacactctcgatcctgaagtagaacgacgttaccgtaatgcgctttcactacaagccccgtgtcctgacatcatccgcatcaatcgttttgcgttttatgaacgggcgcaaaaagcctttgcgatcgttatcacaggcgaacgagcgaagtacgggaatattcttttaaaaaaaggggtaacaccgtaatctcataccggtacgcccgcatgacgcgggcggttatcgaatgatggggtgaaaaatatgaaagcggcacgccagcaagcgatagtcgacctgctgctgaaccataccagcctgaccacggaagctctctctgaacagctaaaggtcagtaaagaaaccattcgtcgcgatctcaatgaattacagacgcagggtaaaattctgcgcaatcatggacgcgctaaatatatccaccgtcaaaatcaagacagtggcgatccctttcacatcaggctgaaaagccattatgcgcataaagcagatatcgcgcgcgaggcgctcgcgtggattgaagaagggatggtgatagccttagacgccagttcaacttgctggtatctggcacgccagttgcctgacatcaacattcaggtcttcaccaatagccatccgatttgccatgaactcggtaaacgcgaacgcattcaactgatcagttccggcggcacacttgagcgcaaatatggctgttacgtcaatccctcgctgatttcccaacttaaatcgctggaaatcgatctgtttattttttcttgtgaagggatcgatagcagcggcgcactgtgggactccaatgcgatcaacgctgattacaaatcgatgctattaaaacgtgccgcgcaatcgttgttattgattgataaaagtaaatttaatcgttcaggggaagcccgcatcgggcatctggatgaggtaacgcacattatttctgatgagcgccaggttgcaacttctttggtaacagcctgacggaaagggtagcaggccggagacgacgccccggccttgcctgttatcgctcgtcgcgacgaccacccaccgcagcccagatgcggcggacgtgcaccgtcacttcttcgcgatcgtgatacaactgccgcgcctgaatctgagcatttatgccatgttcatcaagctgtgcctgaatatacgccagattgtgtgacacttcttcgtagcgttttttcatcggcagtttgaggttgaaaatggtttcacggcaccagccattaaccagccactgcgccatcaatgccgcaactttcgccggtttttcaaccatatcgcataccatccaggagatattgctgcgcgtcggacggaatttgaaaccgtcttcccgcagccacgtcacctgtccggtatccatcagactttgcgccatcgggccgttgtcgacggaataaacccacatgttgcgcttcaccagttggtaggtccagccgccagggcaagcgcctaaatccaccgcccacatcccgttcgccaggcgttcatcccactcatccgcaggaataaacacatgaaatgcctcttccagtttgagcgtggaacgactcggcgcatctgccggaaatttcaggcgcggaatgcccatatagaacggcgaattattgttgctgtatgagtaaccggtatagcagcagcctggtgcaataaagaatacatgcacaaccggacgcttcggcgtttcatagttcgccagccccccggcatcgcgcaaggcagcgcgtagcggaacagtaaatttacggcagaatttcagtaactctttgctttcgttggtatcggcaacttcaacacgcagttcaccgcccttctctactacgccctgtaacatgccgacaatgggggtaatacgatcttctggcggcaaatgctgcaggagttcccccaccacaaaccactggcgggcaaaaattaatgaactgaacggcagctcacggattaacttatcgccatcatcaggttgataacattcataaatgacataacccgcattctctttcacgcgggcaaaaccgaaaatttcccgctggccggctttatcggtaatttctgcggcgcactctttttcaaagcccggacggcacagcaatacaaccttattcatgacttacgcccttgcgctttaaacggatagcaccaactaacattaacgcccagcccgcgaggaagctcacgccgccaaccggagtgacaaacgcccacaaacgcagatgggacagcgccaggcaataaaggctgccgctgaacaacaccgtgcctaacgcgaggaaaacgctactccagtaaaaccagatactgatgcgacgctgcattgccaccgccagacctaagatcgccagcgtatgaaacgcctggtattcgaggccggtctggatccagcccatctcaacggcccccatggttttacttaacacatgcgcgccaaaagcgcccagagccacaaaaatgaagccgctaatggcggcgaaaatcagcataaaatggctggtcatggtcgtaccctacgtaaattattgttcataacgaaagcggaatttttcttgttcagcagcggctttcgccaggatccattggcgaaaggcggctattttacccagttctgcctgactgtcatgacaaaccagataaaaagcatttttactgaccagaacatcattaaacgggcaaacaagacgtccggcctcgatttcagattgcgccatcacgttatttgccagcgccactccctgcccgtggatagccgcttgcagcaccatggcgctatggctaaaaattggcccttgctgaacgttgatatgatttaaccccaactgtcgggtatatgtctgccagtcacggcgcgaagcatcatgtaataacgtatgtttagccagatcttccggtgtcttcaagggtttttcgccagtcagcagtagcggcgaacacaccggcaataaatattcggcgtacagtttttccacccgtagccccggccagttgccccgaccataaaatatcgccacatcaacatcatccgccagcttatcttcctgacgatcaaccgcctggattcgaacgtcaattcccggataagctgaattaaagctggaaagtcgcggaaccaaccaatgaatggcgaaactggggagtaaactgaccgtcaacgcccccttggcgctacgggcctggagtttacgcgtcgcttcggttaattgcgaaaatatctctttgatatcgaggaaatagctttgcccttcctcggtcagcaggagtgaacgattacggcggcggaacagttttagccccaaaaaatcctcaagagacttgatttgatgacttactgcggcttgggtcacaaaaagctcttctgctgcgcgagtgaaacttaaatggcgtgctgcggcatcaaaaactcgtaaggcatttagcggtggtaatcgtttagacatggctattaaactttgatgttaaatgaatttaacaattagatcacgctatgtaacctattagtttttttaatctgagccattataaattgtccgttgagcttctaccagcaaatacctatagtggcggcacttcctgagccggaacgaaaagttttatcggaatgcgtgttctggtgaacttttggcttacggttgtgatgttgtgttgttgtgtttgcaattggtctgcgattcagaccatggtagcaaagctaccttttttcacttcctgtacatttaccctgtctgtccatagtgattaatgtagcaccgcctaattgcggtgcttttttttaccttgcgatcgcgaattactgatccagttcgaccatctctttcacgtcagtacggttgatctgctgtttgttgccattagcgtctttatacgaaatcataccggtatcgttatcagtctgtggtttgccgtcagagacgatggtacgtccgtcattggtgtgcatcacatagttcgaaccggaacaggcgctcagggcaaaagtcagcatacaggcagaaataattgcggcagtctttttcatcatcttctccttaaagcgattaataaatcttaatagtattgattaacaggctaaaattaacgcctaacactattcagcatatgttacttacgcggcttcgccaggatatccagataattctgatggttagcactctccttgtatcaaagtgaattttgcgtcacgatcggtgcatcaagccgaggagtaccatgaacgtttttaatcccgcgcagtttcgcgcccagtttcccgcactacaggatgcgggcgtctatctcgacagcgccgcgaccgcgcttaaacctgaagccgtggttgaagccacccaacagttttacagtctgagcgccggaaacgtccatcgcagccagtttgccgaagcccaacgcctgaccgcgcgttatgaagctgcacgagagaaagtggcgcaattactgaatgcaccggatgataaaactatcgtctggacgcgcggcaccactgaatccatcaacatggtggcacaatgctatgcgcgtccgcgtctgcaaccgggcgatgagattattgtcagcgtggcagaacaccacgccaacctcgtcccctggctgatggtcgcccaacaaactggagccaaagtggtgaaattgccgcttaatgcgcagcgactgccggatgtcgatttgttgccagaactgattactccccgtagtcggattctggcgttgggtcagatgtcgaacgttactggcggttgcccggatctggcgcgagcgattacctttgctcattcagccgggatggtggtgatggttgatggtgctcagggggcagtgcatttccccgcggatgttcagcaactggatattgatttctatgctttttcaggtcacaaactgtatggcccgacaggtatcggcgtgctgtatggtaaatcagaactgctggaggcgatgtcgccctggctgggcggcggcaaaatggttcacgaagtgagttttgacggcttcacgactcaatctgcgccgtggaaactggaagcaggaacgccaaatgtcgctggtgtcataggattaagcgcggcgctggaatggctggcagattacgatatcaaccaggccgaaagctggagccgtagcttagcaacgctggcggaagatgcgctggcgaaacgtcccggctttcgttcattccgctgccaggattccagcctgctggcctttgattttgctggcgttcatcatagcgatatggtgacgctgctggcggagtacggtattgccctgcgggccgggcagcattgcgctcagccgctactggcagaattaggcgtaaccggcacactgcgcgcctcttttgcgccatataatacaaagagtgatgtggatgcgctggtgaatgccgttgaccgcgcgctggaattattggtggattaatgacaaacccgcaattcgccggacatccgttcggcacaaccgtaaccgcagaaacgttacgcaataccttcgcaccgttgacgcaatgggaagataaatatcgccagttgatcatgctggggaaacagcttccggcattgccagacgagttaaaagcgcaggctaaagagattgccggatgcgaaaaccgcgtctggctgggatatacagtggctgaaaacggcaaaatgcatttctttggcgacagcgaagggcgcattgtgcgcggcctgctggcggtgttgttgactgccgttgaggggaaaaccgccgccgagttgcaggcacagtcaccactggcattgtttgatgagctgggattacgtgcgcagcttagcgcctcacgcagccaggggttaaatgcgttaagcgaggcgattatcgctgcgacgaagcaggtttaagcacagaaccgggtcggataagacgttcgcgtctcatccgacctgattgtttaaccctgacgcgccgctttcgccatcatcttcttcagcgcatgagaaaccgcaacaaacccaaaggtggcggtcaccatcgttgccgcgccaaatccagatgcacaatccatccgcttcggcccttctgccgtggctttcatcgcacacaccgtaccgtctgactgcgggtacaccagcgcttcagtagaaaacacgcaatccacgccgagcttacctttactgtttttcactacgccaaaatcgcttttcaggcgctcgcgcaacttcgccgccagcgggtcctgaatcgttttcgccagatcggtaacctgaatctgcgtcggatcaatctgcccacccgcgccaccggttgtgaccagtgggattttattgcgccgacaataagcaatcagcgccgctttgggccgtacactatcaatggcatcaatcacgtacgaataacccacgctcatatactgcgctacgttatccggcgtcacgaaatcatccaccaccgttacacggcactccgggttaatctggcgaatacgctccgccataacttccgcttttgccagcccaacgttatcgcgcagggcatgaatttgccgattggtattggtgacgcacacatcatccatatcgataagcgtgattgcgccaatccccgtgcgcgccagcgcttccgccgcccaggaaccgacaccaccgataccaaccacacaaatatgcgcgtcagcaaacagttgcaacgctttttcaccatacagacgcgctgtgccaccaaaacgctgacgccatgcatcactaattaccacagacatagcacctcagaattaaaaagggcgaggttatccctcaccctaaacgcataaatgcctgatgcgctacgcttatcaggcctacataactcctgcaatattttggatttgcatgatttgtaggccggataaggcgttcacgccgcatccggcatgaacaacgcgcacttagtcaataatcaggatgtgaggttacccctcaccctgtcatatccgtaaaaacggcatacagaatatcacatcagccgctaaagacgttacctgcgcccggggcggttttcagcacccagacacgtccatagtggttgtaccaacctgcgcggtgtccggcttccggcccgatcccttgatagatatcgaagtgttggcctttgattgcaccaccgacatccagcgccaccatcagacgcagttcgtactgaccattaaatttgccgttattatccagcaacggcacttctgccagcaaggtagtacctggcggaataatggaacgatcagaggcaactgacgcgcgaccaaccagcggcaccgcacttgcccctttcaccggagcaaaagattgcggtttaaagaagacgaaagacgggttctgttccagcagctcgcgaacctcggcttcactgtgtgtttcgccccagtgacgaatcgcctgcatcgacatatcttcttttttcacttcgccacggtcgatcagcaccttaccaatgctgcgataggcatgaccgtttttccctgcatagctgaaaaagttaagcggactgccatcaccaaagtcgatatacccactaccctgcacatccataatgaagttatccatcagggagttactgtaagcgagaatatatttatcactcaatgcccccgcgtagatctccgcacgagacggcagacgaccacgttttggcggcatacggtaaataggatactggaactcgccctggcgggtatggcgcgcctgaattaccggcgtgtaataaccggtaaactgcacgttaccatagttgtcggcaccttccatctgccaggcatcaatgccgaactggcgcatattgcgggtatcaccgcctgcgcgcagccactcttgcaccgcgttataaacattactctggttgccatacagacgcggtgacgaattacggatatggttaatttgctcggcaaaatcaccggcgttaatcggcgcgccaacggcatctggctggttcaccagagagaaaggctgggtaaatttcccgtctttatattgctgtccgcgatcggttggtttggaagagcaggcggcaagcattgccacaaccgtgcccataagaaggtactttacccaacgtcctttcattgttctcttcttcaggttaaaaaataaggcgcaacgaagataacaaaccgccgcgtttaatgaaatgagcagcctctccctgacgcaaattttgcacaaaaaataggctttagtgatttgtttttgttcaaaatcatgccaaatccgtgatcggggtaaaaaaaaggttgcatgaaaacgcgagcggagtatagtgcgcatccacggacgcggggtggagcagcctggtagctcgtcgggctcataacccgaaggtcgtcggttcaaatccggcccccgcaaccaattaaaatttgatgaagtaaagcagtacggtgacgcggggtggagcagcctggtagctcgtcgggctcataacccgaaggtcgtcggttcaaatccggcccccgcaaccaattattgaacaccctaacgggtgtttttttgtttctggtctcccataaaaaagcgccattcagcgcctttttatcatccccttctcgccagcgtcgccccatcggcaaaatacgctttaatccccgcaagaatagactccgcaacttcctgctggaaagtcgccgttttcagtttacgctcttcctcaacgttactgataaacgccgtttcgaccagaatggagggaatatctggtgcctttagtacggcaaacccggcctgttcaacttgatttttatgcagcttgttgattttaccgagcttattcagtaccgctttaccaaacttcaggctgtcggcaatggtcagcgactgtaccatatcgaacatggtgtggtcgacatagcggtcaccgcttttgctcacgccaccaatcaagtccgaggcgttctgggtttgtgccagatattttgccgcagtactggttgcacctttggttgagagcgcaaacacagaggaaccgctcggctgacgactggtaaaggcgtcggcatggatagagacaaacaggtcagcacgctgtttctgggcttttgctacgcgcacttgcaatggaatgaagatgtcttcattgcgcgtcatgtacaccttcatattgccctctttctcgatcagagagcgcaaacggcgagctatttgcaataccacatctttttcgcgcgttttgtatttccccaccgcaccggagtcttcgccaccgtggccagggtcaagcataatgacaatcggacgatcgcgccctgctttacccggttgtggaccactttgcgctggcggcacctgcttttcgaggtcgcctttgttgtaatcctccagcagcgccagcagcgggtcctgcatatcctgtgcattggccggatagaggtccatcaccagacgctctttaaacccggcgaccggcgcaagggcaaacagctgcggttttacgttttgctttaattcaaaaaccatccgtacggtttgcgggtcaaattgcccgacgcgcgccgacttgatgaacgggtcgtctgcacgaatttgtgccgccatccccttgagtaccgagttcaggtttacatcttcgatatccaccaccacgcgttcagggttactcaacgcgaactgcttatatttcagctgacgatttgattccaccgtcacgcgggtgtagctggacgcaggccagacgcgcaccgccacgacctggctgaccgcagccagactgacctgacttacgctcaatagccacatggcacccgcgccttgcagtaaacgacgacggctgattgcagtgttggatcctgacatgcctctcccgagcaaaagaaatctaagctgtgtaacaagtaaacgactaatttgaccggaaactttagcgaaagacgcataatctgtcatctaataaacggtaaacattctttttatattcacggcattactgataaaaaagtcgctctcgcataaaatttacacttgcaccctgcgaaaaaacagaataaaaatacactaatttcgaataatcatgcaaagaggtgtgccgtggtaaaggaacgtaaaaccgagttggtcgagggattccgccattcggttccctatatcaatacccaccggggaaaaacgtttgtcatcatgctcggcggtgaagccattgagcatgagaatttctccagtatcgttaatgatatcgggttgttgcacagcctcggcatccgtctggtggtggtctatggcgcacgtccgcagatcgacgcaaatctggctgcgcatcaccacgaaccgctgtatcacaagaatatacgtgtgaccgacgccaaaacactggaactggtgaagcaggctgcgggaacattgcaactggatattactgctcgcctgtcgatgagtctcaataacacgccgctgcagggcgcgcatatcaacgtcgtcagtggcaattttattattgcccagccgctgggcgtcgatgacggcgtggattactgccatagcgggcgtatccggcggattgatgaagacgcgatccatcgtcaactggacagcggtgcaatagtgctaatggggccggtcgctgtttcagtcactggcgagagctttaacctgacctcggaagagattgccactcaactggccatcaaactgaaagctgaaaagatgattggtttttgctcttcccagggcgtcactaatgacgacggtgatattgtctccgaacttttccctaacgaagcgcaagcgcgggtagaagcccaggaagagaaaggcgattacaactccggtacggtgcgctttttgcgtggcgcagtgaaagcctgccgcagcggcgtgcgtcgctgtcatttaatcagttatcaggaagatggcgcgctgttgcaagagttgttctcacgcgacggtatcggtacgcagattgtgatggaaagcgccgagcagattcgtcgcgcaacaatcaacgatattggcggtattctggagttgattcgcccactggagcagcaaggtattctggtacgccgttctcgcgagcagctggagatggaaatcgacaaattcaccattattcagcgcgataacacgactattgcctgcgccgcgctctatccgttcccggaagagaagattggggaaatggcctgtgtggcagttcacccggattaccgcagttcatcaaggggtgaagttctgctggaacgcattgccgctcaggcgaagcagagcggcttaagcaaattgtttgtgctgaccacgcgcagtattcactggttccaggaacgtggatttaccccagtggatattgatttactgcccgagagcaaaaagcagttgtacaactaccagcgtaaatccaaagtgttgatggcggatttagggtaagcgatgaaaatcgtcggatgcgacatgcgtaacactcgtacgtcgcatccggcaattacgtttattcccgtgaactaaacaacgccgccagaccactgcgccgctcagtacgagtggcgattgccgcacttaatatgcgctcatcggcatacagcgacagacggcgacgcgcgcgggtcaccgcggtataaaccagctctcgcgttactaccggcgtgcgttggctcggcaaaatcaacgccgcatggtcgaactccgatccctgcgatttatgtaccgtcatcgcccacgtagtttcgtgctctggcaagcgactcggttgcacagacttaatattgccgtccggcatcgcaaaccagacgcgcgtcccctgcccgcgatccagcgcaataccgatatcgccattaaacaacccaagcgcgctgtcattacgggcaatcatcaccggtcgaccttcgtaccaacgagagtgcggatgacgatgaattttgcgcttctgttgcataaactgctcaattcgctcattcagtccagccacgccaaacggcccttcccgcagggcgcacaaaagctggtactcattgaacgcctgaatgattaaatccggctcggcacgcgcttgcagcagatccagataacgtccgtaacccgcaagagcttcctcaagcatcgcaatataatcttcgccgctctgtaaaagccgtttttcgatatcagtaaaatcctgctgaaaaacggttttcactgccgttttatcaccacggttgatcgccgcagctaactgaccaatgccagaatcgctgccgaaacgatagcttttttgcagcaggcagagactgtcgcgcaaagatgccgcttctgtgccggttcctgccggaacgtgagtccccgtcaggcggcttagctgcctggcacgctcggcggtaaagcccgcgttggcataagcgcagatatcgcccagcacagccccagcctcaaccgaggccagttgatcacgatcgccgagaaagatcactcgcgcatgatcgggcaaggcgtcgatcagtctcgacatcataggcagatcgatcattgacgcttcatctaccaccagcacatcaagatgcagcgggttaccggcatgatgacgtaaacgctggctacccggctgcgcgcccagcaatcggtgcaaagtgctggcatcttccggaatgcgtttcttttgttcatcggtcagcggtaactgtcgcaaagccttgccgagagattcggttaagcgcgcggcagctttacccgttggtgcagccagacggatacggcagcgttcgccgtcggccatttgaattaacgctgccagcaacttcgctacggtggtcgttttaccggtgccagggccgccggaaatcaccgagatccgccgcgtcagcgccactgccgccgcaactttttgccagttaatttcatcgcttactggaaaaagtttgtccagggtttgcgccagtagagcttcatcaacctcaatggcatgattcacttcgttgaaaaagcgtgccactgtgcgctcgttacaccacatgcgattcaaataaagacgatcgccacagaggatcatcggcgtgggttcatctcccctgctgaccgcttgagaagccagcaagcattcttcccaattttgtagctcaccgatttcactgacacaggtcgccaacagcggatgcgacgcctcgttattttccagtcgtgaaagcggcaaacaaacgtgtccctctccggcatcatgacttaacagtgccgccgcgagggtgacggcaggatgttcatctcccgccacggtcagggcaaattgcacatccagcgggcgtagctgtttgtgctccacagcttccagtaattgcttttgcaatttcattacgcctcctccagggtcataccggcaaacatctcatccatcagggcaatcaacccggcgttgggtcgggttgtgtaaatcccctgttgcggatgttctttatcaacgccacgcaggaacagataaataacgccgccaaagtggtgctcatagtcgtaatcagcaatgcgatggcgcagataacgatgcagcgccagggtataaagctgatattgcagatcatagcggtgtgcctgcattgccgctgccatagcctgttgggtgtaagccgaactgtcttcacccaaccagttggatttatagtcgagcaggtaataacgcccttcgtggcggaacaccaggtcgataaagccttttaacatgccacgtacctgcatgaactccagcggcgggcagcctgcggatagcgggtcaaactggcggattaacgtatcaagctgactggcgataagcggttcactaatcggcagataaaactccatctccacctgtttattgcgggcggaaagttgactcaggcttacgccggtttcattgagaggtgcctggaggacagccgtgatccactcggtcaataccggttcccactgcgattcaaagccgccgagttccagtttttcccgcacccagttcgggtcaaccggctgggtaaaatccaggtcttcaaacaaactgtgcaagaacgtccccggtgacgcaccgcgcggaaactgatgtggtgttaacgtcggttcttcaacgacgctggcaacgcctgcagcatcgacatccagccgaggcatcaaatcctgggcgataccgtgaccacgctgttgcaaaccagagtagctggtgacgcgccagttatcgccgggcaatcgttgtaacgtcttcgcattcagctctgctgtagaaacatcattaacctgccagggttggttatcaccagtttgtgccgtttgccaggcaatatcatcatcgcataacgcttcaatacaggtgcgaagccctgccgcatcttgcggttcccctttttgcagcaaacgcccgagcgcactttggtggacgtcggtgtcaccttttttatcgccacgacggcgcaccagcggtgcaacgccgagactgcaatgccaaaccgaacgtgtcagcgccacgtaaagcaaacgcagatcttccgccagacgttcggcctccgcgaggtcgacgctttctggcgcagcattaagatccagaactgcctcaaacgagtggcgatcgtgataaaacgcctgctcctggacgcggaaattggtgataaacggcagccagaccaatggatattccagccctttcgatttgtggatcgtgacaatctgcaccagatgtttatcactttcgagacgcatttgttggctggaggcattactgtctggctcgaggatatgttgcgataaccagcgtaccagcgcatgttcactttccagctgcgttccggcttcttgtagcagttcgctgatatgcaagatatcggtaagacgccgctcaccgcctgccgttgccagcaagttttcagcaatgttacgcgccgacatcagcgcccgcagcatcggcataacgccacgtttgcgccagatttgccgataaccatcgaactcttcgactaccacatcccacgcatgttcgtcattgttcagcgtttcgatatccagcgcgttcagccccatcattgacgttgccagcgcactacgcagggtgttctcacgttcgggcgtcatcaccgcctgcaacaaccaaagcatttcctgcgcttccagagtttcaaaaacactgtcgcggttcgaaaggtaaacggaagggatttccagcaacgttaaggcatcgcgcacctgggcggcctcctggcggctgcgcaccagcacactgatgtccgaagcacgcaccggacgcgcgtcgtcgccgttcatcagcaacgcttcgccccgctgtccggcttgtagccagtcgcggatttgcgcagcacatacctgcgccatggtactttgataatcgccaacgccgcagctttcgccttccatcagccacattttcatcgcaggctgtgtttcacctttaaatacaaaacgtaacgcctgatttttcccggctgatttcactggaataaacggtatttcgcgaaacatgaacgcgtcatcagtctggctgaaaagcttattcacgctgttcaccattcctggtgcggaacgccagttggtgtctaaagtgtagtgggcgtgaacttcgctacgcgccttcatataagtgaagatatccgcaccccggaatgcatatatggcctgcttcgggtcgccaattagcaacaatgcggtttccggctgatggtgccagatacggcgaaaaattcggtactgctgggggtcggtatcctgaaattcatcgatcattgccaccgggaatcgcgtacggatcgccgctgccaacacctcaccgctttcgctacgcagcgcggaatcgagccgacttaacatgtcatcaaaacccaattcgccacggcggcgtttttcacgcgctactgtttcgcggatctcagccaatgcgcgggtgatcaccagatcgcggatcgacaatggttctgcaagcagttgatcgatcgcctcaaacagtggatgtcgcggggttccccccccggccttcgtgcgatcttctaagaaacgctgggagaatttttccagcgactccggcaactgataactgtttgtctcttcttctgcccaggcgctgatcttgtcgatccatttagcctgattgctacggttaaacttgcgtcgatcaataccagaagattcgatcagcgcatccagttcacccactgcgtcgcgccactgctgttttaccgtatcaatacgcgccacaatttgcgcgtgacgggaagccagcgtttcatcatcgggcggcggtgctttgataaccggcgcttcgccttgcagataacgattaatatcgcgcagcaacgcctgcggccctttccaggtttcaaagacgacctgggctatttcacgcggcagcgggtagcagtggcgacgccagaaatcggcgcaggcctggtagcgtagcagagactcatcttcaatcagctgctgctcaaacagcatgccggattcaaaggcattcaggttgagcatgcgctggcaaaagccgtgaatagtaaagactgccgcttcatccatctgccgttcggctaacaacaaccactgcgcggcttgcgctttatcgtcgatctcttccagcaggcgttcgtacagtggattgtcggtggtttcacgcagacaggcgatgcgcaactcgtggatattgctacggatacgaccgcgcaattctgccgtggcagcctcggtaaaggtgaccaccagcagttcttcaacggtcagcgggcggggaaaggcggcggaaccgcctagtccaagtaacaggcgcaaatagagcgccgcaatcgtaaaggttttgcctgtgccggcagaggcttcaatcaggcgctcaccctgtaagggcaagcgcaaaggatctagtgtctcggcgacatcactcattcttttcactcatcaggggcattgtttgctgcaacgcgctgacgttctcccacactttccagccttcagggtgtacatattcggctttcccgttctggctgccggaaatctgcgacagaatagccatgccttgcggctcgaccaccgcctgatggaagaaatcagcaagtttttgcggcgtcagcagttttatctgggccacgattttatcacgcgaatcgaagcgcatattgccgcgatcgaaatctttacttaacttcgatgcttcttcgccgagcgtttgcggtgcctgcagcatctgggtaattaccgcctgctggatttgcgcaaactcatctggcttcatcgctcgcaattttgcctctgcggttgggaaaaacgccttgtaacgctcccacaagaatgaaggctgtttatcattgctttgcaaaaggaagcccatgccccactgacgccccacgctcattggaaacgcaaacacggcatagcccaattgttcttcggtacgcaactgattgtagaaccacggctgtacgatctgccccaacagagagctataggctgagctggtgtattcatcgtagccagtcggtacaaataccgctgccagtgcggagtcggtgctgttaccggctttttcaaagatgacggattgttttttatcgaccactacatctttgtttcgacaccactctgaaccatcagcgcccaactgtttttgcacatcgcgtgccagcgttgttgcctgggcctcggtcatgttgccgataaccataaactctggtcgagcccctgattttaaggcgtcgcgataggccagcacctctttcaacgtaatggagggcaaaattttacgccgttcatctcgcgagaagtacggcacttgcgagagcatctgcgcgggcataatcgcctgctcaaacgctttacccttttctgcggaatccatcatctggttataccaggacttcgcctgctcaagctgatcttccgtagcggtatagctaaagtacccctcgagcaatgcctggaacagctgcggcagacgctgggtgtaaccattagcattaaccataaggccgttgttagcgttggtggaaaaacttatgccaccaaccgacgcctggttgcttaactgatcaagcgccagccctgcgagataatcattgagcgcaaacatcacctgattgcgggcgctgtccatggctttcggattacgcaaaatcaggctgacatcagctttgggctcgctggcaaaataacggcttggcgcatacaccacgcgcagattcgactcatcaacaatcagctctggatggtcgtatttcttctctgacttaatcagcgagaaatcatcaggaatataagggttaagctctggcaaagagagcgcaatgtcggcggcttttttctgccagtcggcgaaagtttgtgcgctgattttatcgacctgatacggcgcatcgacaaagtaagccgttttgttgtgcggctctttcgggctgatataccagatacgcgcattctgcggcgtcatcatcgccagacgttcctttactgctttagcatcgtaccgatcggcaatattgactgcatccagcgtatgctcaacaggaacgcgaatcatggtatctgccagccattcgacgtaatccatatcacgggtgatcgacggataacggaagtcgatatccagcacattcgccagttcatcgaagtattgtttatcaatgcctttttcacgtaacagattgagatagctaaaaattgccgccacaacctgatcgcgattagccaggcctttatcggttaaagacgcagagatcgctaatacgccgctgttgccgttgacgataggatcggagttggcgctaatgccctcaactaatccctgcttttgcagccagtcagaaagtgtacctgggctgcgattgccaatcagataggtaatcaattcatcggttttactacggaacttcgctgagttgttatcgatgcgaaactcaacgcgcaacactttacgcggcagcgcagggacgtaatgaatgataatgcccttttgcgcgtcggtgactaccggcacggtgatttccggttttttgctctctttgttcggcacgcgaccaaaggtgtccgccgccatttttgccaactccggcagcggtttattactgtaaataaccgccttcatcaaattggcggaatagtacttctcgtggaaatctttcagcgcctgctgcaccggattaccaggtttgtcgcttaaagtttcgaggttaccaccagaaaactttgaaccggggtgtgccgggttaatggtttctgcgctgacctgtgccatgcgcatcccgtcacgcgtacgcgccatggttaattcagcgttcaccgcattacgctcacgttcggcatatttcttgtcgagcaaaggttcagcaatagcatcggccaggcggtctaccgcaccaggcaaggcgtcgttctcaacttccagatagaaagccgtgcgatacggcgcagtgctggcattgtgactaccgccgtgcattttgagatattcggccagactgtcagcctgcgggtactttttcgaccccatcagactcatatgttcaaggtaatgtgccagcccctggtacgcctcgggatcttccagcgacccaacgggcaccaccagcgccgagagcgatttaactgcctgcggatcagaaaccagcaagaccaccataccgttatccagacgtatagcctgatactggcggttatctttatcacttttacggatggtttcctgaatcggctgccatcccgtttctgcctgacttaagggtgcccaaagggcaactaacaacaataatgctttgaaccaggtgctgcggggcattcacggacctcataatcaacttaattttctgtccagattcaacacgttaacgcaaatcatctgccagaatttaatcttgtgctgcacgagtcagcctatgtttatataaccatcagtccgtgactggtgcgcatcataaagtaagcggatagattgcgcaatttttatacagcactcatgactgattaaagcgaaacagcggtaacaggaaacgttgcgactgttcaacgatggcctccattgtctctggtgttaattgccgccagagcctttgataccagatatcatcaccttcgccacgcaccatcatgttgccttcgtaagcctgaaggaatttcgtacgggctttttgcaacgtggaatcgtcatccagcatggcatcgttttgcgcgtcataacaggtttttagccacgcgccgccactttcaggtaacaccagcaatggcgcggacattccttcacgatacccctcaatcagttgtgagaggtaatgcaaagcctgttcggctgcaagcggcggaaaacgccactcgccgtctttgcgtagaaaaaggcgactttcaccattaccaccgctggcacagtagacaaggtgttccagccaaagttgcattccctgggccacacttaataaagagggacgccagcgcaacaggccatccggctgcacctgcggcaaccagccagttatctgcacaccgttgcaggcgagatcaatttccatactctgccccggctggcgacaggcaatgactctgtcggcaagctgctgcatctcctggcactgtgtttcccagaaaatttcacccaaagcgccatacggtaaatcccctgccgctcggaagcggcggaacaagcgttcggcatcatcctgctcaaccagtgcattcaataactgctgattgatttgataacggctaagtccttccagaataaatggctcggtgtcggggatttcgctgtcttcagtacggaagttcacctgcaaacgcatctggaaaaatgcccgcaccggatgtgcccagaatcgttgtagcgtttccagcggcacggtttccggtaaggtaaacggcagcggctgaacaaattcagaatgtgctttaccagcctggctggccgcaggtagccattcacgagcatagctttgtcgttcgcctggctggtagttttgtggatcaaacggcatccgggtatggaggcaagtaagatgcgcttttacccttgcctcgctttcatcacagttgagcgcttcatcgcccggtagataatgactttgcccgatgtagtcgatcagttcctgcaccagtaccgacgggaaacgctcactgttatcctgaatggaacgaccgatatagctgatatagagtttttgctgcgcggaaattaacgcttccaggaacagatagcggtcgtcatcgcgacggctacggtcgccacgcttcggtttctggctcatcaggtcaaagcccaatggcgcaagctgacgtggataaacgccgtcgttcattcccagcaggcaaaccactttgaacggaattgaacgcattggcatcagagtacaaatgttaaccggtccggcgagaaaacgctggctgatacgttcttgatccagacgctgtgccagttcatcacgcaatagtgacagcggcaccgcgtcgccatactgcgcacctaaaccttcggcgataatcgcctgccattgttgttcgatcagcgtcatcgccgcttcggtttccgcatccggcaggaagaaggcgttgagcatatcgcgacaaaccggcaaccactcttccagcggacgctcctgtgccagcccgcgacgccagatgtttagctgcattagcagtgaagccagatgccccaccagttctgcaattaagccgctcgattcatcataaggtagaaccgattgccactcgccctgcgcgctctccatcgcgtagcccaacaacatacgcgtcaggccaaatcgccaggtgtgttgtccggtggcggggagttccagctcgcgaacgttgtcgtcatctatgccccaacgaatgccggattcgttgacccactggcgtaaataacgcagcccttcttcggtgatgtcaaaccgcgccgccagcaccggcacatccagcaacgccagcacatcctctgacacaaaacgactgtcaggcagtgataacaggctgataaacgcttccagtaccggatgtgactgccgcgcacgacggtcggaaatggcgtaaggtaggtaacgatccgcaggtgcgctaccaaacacagcctgaataaacggactgtagctgtcgatatcagccaccatcacgatgatgtcgcgcggagtaagtgtcgggtcttcctccagcatcgccagcaggcgatcgtgtaaaacttcaacttcacgctgcgggctatggcaaacgtggaaggtgatactgctatccagtggatcaagcgggcgtttgttatcgctacgggaaaactcttcgatgttcacaccagcaacggcgcggttttccagttccagaatgtcagactgaatgttatgcagcaggttatctggcgtgacatcgacaaaggcgtccagctcctggctgctctccaggtcagaaaggagataaatgtagtcgcgcccaagcttaccccatgaagccagcagcgggttgccgacatcctgttcaccatcgctgttaaagagctgcccggcattttcgctatcacgaaatagcggcaattcgcgatcttcaaaactgtgtcgacgctgacgggtcagcagtttcgccagataagcaggatctttaatatcgccccagtaataacggcaggggttggtaaacaggagatggatttcaatatgtttacccagcgcctgtagcgcctggagataaacaggcggtaacgcggaaataccgcatataaagacgcgcgaaggtaaccccggcgggcaggtcgtcgcggactccagcgtttcgataaagcgctgatagagattggcgcggtgccagcgcggttgcccgagttgatgggtatattccaccagcgccttccacaacggggcttgccaggcctgtgcttctcccagcccttcaaccaaatgtcctgtttcccactgtgccagccagtccggacgatagaccagatactggtcaaacaggtccgccgcttttgaggaaagctggaacagttttcgcttgtcgctatcgtcagtcagataatgccgcaacagggtaaagtcttcgcgctccagcaattgcggcagcagagtcatcagtttccagctcatgctctgtttgttaaaggcgctctctttggggatttccggtaacacccggacgaacatatcccagataaagctcgctggcagcggaaaatcaatgtttgccgcaataccaaacttttgcgacagggtcatttgcagccactgtgccataccggtactttgcaccagaatcatctctggttcgaaaggatcgtccagccgttcgcgttcgacaataaactccatcaacgcttccagcacgtccagacgattggaatggtagacccttaacatagcggctcctgactactgacgattcgggcaatgcaggcgggtcatctcgccttctctgcccccgggtgaaactagcgtaacgctgatgctgacacatcccgcctgcgatgtctgcattcggttgacctgccagttggcaggtggcgaaatcgcgcgcagttgcgtttgctgccagccatgccgccagagctgttggtactggtttctgctggcaagactgttcattaatgttcgctggaaacccgataacgcagtgacaatcatcaccatcaacaccatcgccaacattacctccggcaggctaaagccttgttgattcttcagggaagctgacataacgccctctctttcagcggacaaaaatcgctccagccgcgtggcgaaaaaacaatgtttccatcaatgacttcgcctgttcgccacaacgaaacgccttcataaccggcaatcaataaggcttcattatctgccagtaaacgcaaacaaacctgggcatcggtttcagcgtactgcgagcactgaactgctggctgcgtctgccaggagtgcatttttccccacgccagcgccgactgaacgatggcctggcggcgcaatgactgactttccatgctcacgcgagaggcaaaactgcgatcctgttggctcattccttgtaatagcaaactacccaaaaccagcagcatcaggaccagagccagtgacgaaacacccttttcgcggttcacaggttgaatcctgtcacgctatagctggcattcaccacggtttgcggttcagacttactggcagcacgcatattaaccgtcaacaccggcgagaagccgctgacatcctgacgtacgacctgaaaagtgtcgataatgatggcatccggattagtgactttatcccagcccttaccttcacaggatgtcgcaccgcgtagcgtttccagcacatgctccttcagacgaaatccaatctggtcggactcttttaccggttcgcgatcccagataccgttactgttcgcatcccactgcacaatgacacagtcaccctgtccgacaatttccagcccttcgccggtacagatgccatgacaataacccgccctctggagatgcttcgcgacggtaaatacccgcagccagatttcatcttccagcgccagcttacgggtgctcgttaaactttcacgctgtaacgcaggcagaaagcgtgccgcccccagcaacaatacgctactgatcgccatagcaatcaacacttccagcagagaaaaaccttgctcttttacaggcatccttctgtttctccttgctgacaaagccggagtcttccccacggcgaaaccaccagccaccactcgcccgttgagtttttgaagcgaatatgcccggcccatgcggtattgcgcaggccaaagaaagcaagcgaaggtgtcaggtcgctcatttcgacttcgggccagcgtggcacaaagaccaatggtgaactgccatgacaggtattggccccagcagcggaactcacaaggcaccataacgtcccctccctgataacgctgatactgtggtcgcggttatgccagttggcatcttcacgtaaatagagcaaatagtcccgcgcctggctggcggtttgccatagccgttgcgactgctgccagtattgccagccatagagtccacttgcgattagcatgaccaaaatcagcatcgcgaccagcgtttcaatcagcgtataaccacgttgtgttttcatgccggcagtatggagcgaggagaaaaaaagacgagggccagtttctatttcttcggcgcatcttccggactatttacgccgttgcaggacgttgcaaaatttcgggaaggcgtctcgaagaatttaacggagggtaaaaaaaccgacgcacactggcgtcggctctggcaggatgtttcgtaattagatagccaccggcgctttaatgcccggatgcggatcgtagccttcaatctcaaagtcttcgaaacggtagtcgaagatggattcgggtttacgtttgataatcaacttcggcagcggacgcggttcgcggcttaattgcagatgagtttgatccatatggttgctgtacagatgcgtgtcgccaccggtccagacaaaatcacccacttccagatcgcactgctgcgccatcatatgcaccaataacgcgtagctggcaatgttgaacggcaggccgaggaagacgtcacaggagcgctgataaagctggcaagagagtttgccgtctgccacatagaactggaagaatgcatggcacggtgccagcgccattttatccagttcgcctacgttccacgctgaaacaataatgcggcgcgaatccgggtcgtttttcagctggttcagtaccgtagtgatctggtcaatatgacgaccatctggcgttggccaggcgcgccactgtttaccatacactggcccgaggtcgccgttttcatcggcccattcgtcccagatggtgacattgttttcgtgtagataagcaatgttagtgtcgccctgcagaaaccacagcagttcatggatgatggaacgcaggtggcaacatttagttgtcaccagcgggaatccatcttgcaggttaaaacgcatctgatgaccaaaaatggaaagcgttccggttccggtacggtcgtttttctgtgtgccttcgtcgagcactttttgcatcagttctaaatactgtttcatggttcctcaggaaacgtgttgctgtgggctgcgacgatatgcccagaccatcatgatcacacccgcgacaatcatcgggatggaaagaatttgccccatgctgatgtactgcacccaggcaccggtaaactgcgcgtcgggctggcggaaaaactcaacaatgatgcgaaacgcgccgtaaccaatcaggaacaaacctgagacagctcccattgggcgtggtttacgaatatacaggttgaggataataaacagcaccacaccttccagcagcagctcgtaaagctgtgatgggtggcgcggcagcacaccgtaagtgtcgaaaatggattgccactgcgggttggtttgcagcagcaaaatatcttctgtacgggagccagggaacagcatggcaaacgggaagttcgggtcaacgcggccccacaattcaccgttaataaagttgcccagacgcccggcaccaagaccaaacggaatgagtggtgcgataaaatcagagacctggaagaaggaacgtttagtacggcgggcgaagataatcatcaccacgataacgccaatcaggccgccgtggaaagacatgccgccgtcccagacacggaacagatacagcggatcggccataaactgcgggaaattgtagaacagaacataaccaatacgtcccccgaggaagacgccgaggaagcccgcatagagtaagttttcaacttcatttttggtccagccgctgcccggacgattcgcccgtcgtgttgccagccacattgcaaaaatgaaacccaccagatacatcaggccgtaccagtgaagcgccacgggtcctattgagaaaatgaccggatcaaactccggaaaatgcagatagctactggtcatctgtcaccacaagttcttgttatttcgctgaaagagaacagcgattgaaatgcgcgccgcaggtttcaggcgctccaaaggtgcgaataatagcacaaggggacctggctggttgccggataccgttaaaagatatgtatatgatccgcgctataaccctccgcgaatcagcccgcccatgccgcgacgctccataaaggctgcaacctgatggcgaacttcggtcgccagttgcgcttccagactacgctgcgcaagattttctgcttcggcataatcaatgcgccgcagcaggtattttgcccgcgctacagaacgtccgttcatagacagatggcgatacccaagcccaatgaggattgccacgcacatgggatcgcccgccatttcaccgcacaaacggagatcgattccatgtatttccgcttcccgggcgatcatcgccagagctcgtaacattgcaggatgaagactgtcataaatgttcgccacccgggtattgttgcgatcaacggccagaatgtattgagtcagatcgttggtgccaacagagatgaaatcgacccgctttgccagatgcggcagcataaataccattgacggcacttccagcatgatgccgatacgtggtttgggaatttcgtaaccgatcatctcctcgacttcacgtccggcacgttcaatcaggcggcgtgcttcatcaacttcatcgaggcttgtgaccatcggcaacagaatattcaggttgcccgtagcggcattagcacgcagcatcgcccgcacctggatcaagaagatctccggctgatcgagcgtaatgcgaatcccacgccaacccaggcatggattctcttcgctgatcggcatgtaaggcagctgcttatctgctccgacatccagcgtacgcaaggtgacgggtttatcattgaacatttgcagcatcccctgatactgcgccacctgttcttcttccgacgggaaaccactttgcagcatgaatgggatttcagtgcgataaagaccgatgccatcaatacggctgcccagtttttcttcatgttccgggcttaaaccagcattgagcatgacttttatacgctcaccgctttttaactgcgcgggtaaattgacgtcatcttccgccagacggctaagctcaatctcttcactaattagccgctgatattcttgcagcagtaccggctccggatcgaccagcaattcaccgcgatagccatcaacgatcagcgtcctacgatgcagcaccgaaggctgaatatccgcgcccatcacggtagggatccccagcgcacgtaccatgatcgcagcatgggagttggctgcgccatctcgcacgacaacaccgactaagcgatcctggggcagctcagcaagcgttgtcgctgacagttcatctgccaccagaatgaaacgttccggccaggcgttcggcccttgattagcgtcatcaagatgaaacagcaatcgctgacccagcgcacgtaaatcgccagcccgctctttgagatagttatcacttagcgcggcaaactgttcggcaaatttttcaatgaccgtttttaccgcccactctgccaccgagcctttatcaacctcggcaaacaattcgcgacgcagccgggtgtccgaaagcaggtgcgagtaaagatcgaaaatagccgccgtttctttttgtgcaccggcggcaaagcgtttgctgtagcggcgaaactcgtttgccgcttcttccagcgccccggtcagtcgttcgcgttccagagccggatccagcgttgatgcctgatacacctgttccattaaaggtaacgtggcatcctgccagccttcggcaatcgccacaccaggtgctgccggtaatgcgcggattcgcgtctggcgatattgcccaaacaaggcagtcaactgcgactgagaaagaatagctgccatctgggtggcaagcgtcaccaggaaggattcttcactttcgtcatactggcgcaactctcgttgctgtaccaccagtacaccaagcaactggcgacgttgaataattggtacgcctaaaaacgcgcggaaacgttcttcttttacggaggggatgtatttgaagctggggtgcttttgcgcatctgcaaggtttatcggttccgccagcctgccaaccaggccgacgatcccttcatcaaacgcgagcgttacagtgcgaccgcgtggttttttcagcccccgggtcgccatcaggtagtaacaacgtcgatcatgatcggccaggtagaccgaacagacctcggtatccatcgcaagacagatgtcggtaaccagaatatttaacgcctcattcaggcgtggtgcgctggctaccttttcgactatttcgcgcaggcgagtgagcataattggcgtgacttaacctcttttacgtcgataagcagatgcgttttgtggttttggcgtattttcctgcagtgacatcaccacactcgcgaactctttcattaccctacggtagacatcacgtttaaatgacaccacctgtctgaccggataccagtaacttacccatcgccagccgtcaaactctggtgtactgctggtttgcatattgatttctgcatcgccgctcaccagctgcaagagaaaccatttttgtttttggccgatacaaaccggcttcgtgtcccaacgcaccaaacgtttcggtaatttgtagcgcaaccagttacgcgttgaagcaaggattcgaacgtctttgcggcttaatcctacttcttcaaacaattcacggtacatcgcctgctctgcggattctccggggttgattccgccttgcggaaattgccaggagtgctgaccaaatcgccgggcccacattacctgcccctggcgattacaaatcacgatacctacgtttgggcggtagccatcgtcatcaatcaccggactacctcaaaataaagctttatatacgaatgattgtttcatactccaggaagacggtaaaccactctctgcagggcattacacactaataacaattgaataactcacagttatgtgcagagttataaacagaggaaggggtggatagccgtttttattcaccttttctgtggatagagttgtgaagaactacggaattactacgggaaaacccggagcattctgaataagcccgatatagacattttaaaatattcattatcagtcaatgcattacatgtaattttagtaatgaaaaagagtaattcgtgacccaggtcacacctctcatttacgggttggcgaaagatcaaccaatgccgtatttatccacagaatgtgccactaagttaagcactgaaccactaaaaactggagtttcgtcgcacgtcaaggctgtaaatggaaacagtagtggaggtttttcacagttatcccagctttctgtggataacatggtgtaagatcctgtttattttcagtgaccagatttggaaaacccgttgcagtgttgcgcaactcgattaccggcaacctaaaaagcaatataaatcagagaattgaacaacgcatgtggaaaaagttacactgcgaatattcggcacataattgctgtttgttttttaatcaaggtatcatgacatgtcccaacctcgcccactgctctctcctcccgaaactgaagaacagttgttagcgcaagcacagcaactttctggttatacattgggagaactggcggcacttgtcgggctggttacgccagagaatttaaaacgcgataaaggctggattggcgtgttactggagatctggctaggtgccagcgcagggagtaaacctgagcaagattttgctgctctgggcgtggaacttaaaactatccctgtggatagtcttggtcgtccgctggaaacaacattcgtttgtgttgccccgttaacgggcaatagcggggtgacctgggaaaccagccacgtgcgccacaaactcaaacgcgtactgtggataccggttgaaggcgagcgcagcatcccgctggcgcagcgtcgcgttggatcaccgttgctatggagcccgaatgaagaggaagaccggcagctacgcgaagactgggaagaattaatggatatgattgttctcggtcaggttgagcggattaccgctcgtcacggggagtatttacagatacgaccgaaagcagcgaatgcgaaagcgcttaccgaagccattggtgcccggggcgaacggattctgacgctgccacgcggcttttatttgaagaagaatttcaccagtgcactactggcccgtcattttctgatccagtagccatcgctttgacctgccgctttccgggcatataattaccgcttcatttttttggcagggctttttagatgttatttgcatggataaccgatcctaacgcctggcttgcgctcggtacgctgacgctgctggagatcgttcttgggatcgacaatattattttcctttctctggtggtggcaaagcttcccacagcacaacgtgctcatgcgcgccgtctggggttggcgggagccatggttatgcgtctggcgctgctggcatcaatcgcctgggttacgcgcctgacaaatccgctttttacaatattcagtcaggaaatttctgcccgtgatttgattctgcttctgggtggcttgttccttatctggaaagccagcaaggaaatccacgaatccattgaaggtgaagaagaagggctgaaaacacgcgtttcatcattcctcggcgctatcgtgcagattatgctgctggatattatctttagcctcgactcggtgattacggctgtgggtctgtcagatcacctgtttattatgatggcagccgtggtgattgccgtaggcgtgatgatgttcgccgcgcgctcgattggtgattttgtcgaacgccatccttcggtaaaaatgctggcgctctctttcctgattctggtgggctttaccctgattctggaaagtttcgacatccacgtaccgaaaggttacatctacttcgcgatgttcttctctattgcggttgaaagcctcaacttgattcgcaacaaaaagaatccgctctgatactccgtacgctctcctgcgggagggcgtactcactccttttaccctcacagtttaagattttcctgctttcaagatatataacgtcggtttataaacagactattatcataggtaggccaaatgaggataaccggatgaaaaaatgggcagtaataatttctgcagtcggactggcgtttgctgtttccgggtgttccagtgattacgtcatggcgaccaaagatggccgtatgattttgaccgatggaaaacctgaaattgatgatgataccgggctggtgagttatcacgatcagcaaggtaacgcgatgcaaattaaccgtgatgatgtttcgcaaattattgaacgttaacaaataaggtcagcatccggctggccttaagatttttctctttcccttttcccttccctctgccatttttatattccttatgtcgtgattataaaaaggaaacggctatgcaatatcaccgtataccccacagttcgctggaagtcagcacgctggggcttggcacgatgacgtttggtgaacagaacagcgaagccgacgcccacgcacaactcgactatgccgtcgctcagggcattaaccttatcgacgttgccgaaatgtacccagtacctccgcgccccgaaacgcaagggttaaccgaaacctacgtcggcaactggctggcgaaacatggcagccgcgaaaagttaattatcgcctccaaagtgagcggaccgtcgcgcaataatgacaagggcatccgcccggatcaggcgctggatcggaagaatatccgcgaagcgctgcatgacagcctcaagcgcctacagactgattacctcgatctttatcaggtgcactggccgcagcgcccgaccaactgcttcggcaaactcggttatagctggacggattctgcgcctgcggtttcgctgctggatacgctggacgcactggcagagtaccaacgcgcgggaaaaattcgttatatcggcgtgtcgaacgaaactgcatttggcgtaatgcgctacctgcatctggcggacaaacacgatctgccgcgtattgtcaccattcagaacccttacagtctgttaaaccgcagttttgaagtaggtctggcagaagtcagccagtatgaaggggtcgaactgctggcctattcgtgcctgggtttcggcacgctgaccgggaaatatctcaatggtgcaaaacccgctggcgcacgtaatacgctctttagtcggttcacccgctatagcggtgagcaaacgcaaaaagccgtcgcggcgtatgttgatatcgccagacgtcatggcctggaccctgctcagatggcgctcgcgtttgtacgccgtcaaccgtttgttgccagcactctgctgggcgcaaccacgatggatcagctgaaaactaacatcgaaagtttgcatctggagttaagcgaagacgtattagctgaaattgaagcagtgcatcaggtttatacttatccggcaccataagattaacgccggttaaaaccggcgttaaatattaatgacggcgctgccagatccacagcgccgttattgccagcgcaaacagcgcaccgaagccaatgccaatgggcacgaccgggatgcctatcattaccgccagcgagtaaatgcccagcatcaacaacatggcgctgttttcgccaaggttttgtactgcaatcgcattccccgccccgacgctttttttaccccgctcctgtagcaacgcattgagcggaacgacaaaaaagccccccatcacgccaatcagcatcaacaaggcataggctggcagcagctcgtgttgcagggaaaaaatcagtaccaccacgccaatcaaaatcccggctggcatacagcgtgacacggtttccagcgtaactaacttcgctgccgcacctgcgccaaccacgataccaatcgctaccatcgcgttgagataggtgggcgtagcgttatcggtaatgcccagcgccaccggtacccacagcaccaacaggaaacgcagcgtgacacccgctccccagaataaactggtgcccaccagcgaaaaacgcgtttcaccattgcgccatagcgaggtgcaggcattcaggaaactgcgggtcatgttgatgagattccaggactgccccggacgcgccgccgccagtttgggaatgtagatattggcaacgaccgcaccaccgtaggccagtgcgcatgcggccagggcgacgaggacatgccagtcagccagcacaccaccggctacggaaccgagcaaaatcgccgctatggtagaagcttccattaaaccgttagctttcactaacttactacccgtggttaattcgccgagaataccgtatttcgccggtgaataggctgcagcaccaacacccaccagcgtatagccgagaaacggattgataccaaagcagatactggctgcgcccagcagcttcaggccgttggcaaacatcatcacccggcctttggcgaagctatccgccacctgcccgacaaacggcgcaaaaagaatgtaagcacctacaaacaccatttgcaggatgggctggctccactccggatagaactgcgctttcagtaacgccagagtggcaaacagtagggcattatcgccaaacgcagagagaaactgcgccacgataaccgctttcatccccttcgaccacaacgaagtgttagtgtgcactgactcactcatcgtgttgttccgcttcgtctacccagcttttcaacgtgacaaagtcaggtttgccgctgccaagtaatggcatctgtttcagatagcgaatatcgcgcggtacagcaagctccggcacgccgtgctcgcgggcatactgttgcaacttatcgcgcgtcagttcgttatctgtggtgaaaagcaccagtgcctcgcctttgctggcatcgctcttaatcgcagtggcatggactttatctggcgaaacaccaagtgccagttgttccaccatttccagcgacaccatttcgcctgcaattttggcaaagcgttttgcgcggccctgaatctgcacaaagccctgctcgtcaaaacgcacaatatcgccagtgtcataccagccgcgctccatttcgccgcgaacattctcggcggtgggcacttccagtacacctggcttctccacccgcagatagccgttcattatgttcggccctttcagttgcaggcgtccgccctcttcgataccagggaccgacaacaggcgcgcatccattcctggtagaatacgccctaccgtaccgggtttcgccgccatcggtacgttgatagaaacgacaggcgcgcattcggtcacgccgtagccttcaaggatgcgcaggccaaatttatcctgccaaagctgtttggtactttcttgtaatttttctgcgcctgccaccacatagcgtagacgatagaagtcatacgggttggcgaaacgcgcgtagtgaccgaggaaagtcgaggtgccgaacaacacggtgcaactgcggtcatacaccaactccggcacaatgcggtaatgcagcgggcttggataaaggaacacttctgcacctgtaagcagtggcgtaaacaggcctaccgtcagcccaaaggagtgaaacagcggtaacgccgacataaagcgatcgttggtggtgaagtcggcaatcgttttaatctgctcgacattcgccagaatgcttttatggctatggacgacgcctttcggatggccttcagaaccggaggtaaaaaggatcagcgcctcttcttccggctgctgtttaacctgtgccagacgcggcatcagcaaatgagcgaagatccatactttgtcggcagtggtgacatctgcttttaaatcttccagatagacccagcgcacctgagtaagttgctccggcagatgccagagtttgcctttatcgagaaactggcgggaagtgaagatggttttgatttcagccgccgtaatagcactggtcagcccttttaccccggcagtgtagttcatcattgcgggcatgcggcgacgggcgatggccccaaaaatcactgccgcactgatgcctgcattgggcagcattaagccgatgcgttcgccttcaacactgtatttttcaaggatgcgtccaacaaacagcgttttcgtaagcaatttgcgataggagtctggggtaaagttgacgtcttcgacacatttcttcccggctccgaagcggtacattgcactcagtaaagattcgtacagcgtttcacgcgggcgcaccgccattcgcgcttccatcattatttgatgcagcatttcgccagcgattttgcgacggtcacgggcacgcggcgcatccggcatcgccacctgcgttggtggcaaaatatgcagagtaatttgcgggaacaagcgacgtttaaccagacctttcaggcggctgaagtgcgtaagttccgccccttcaatacgcacaggaataaccgttgcaccagacttcgccgcgacaaaacccgcaccatcgtagattttcatcagcgagcctgtcgtggtgatgcgtccttcagggaaaatcaccactggtcggccctgttccaccagacgtaccagatgtttaatagccataggttgcgtcgggtcgagaggaacaaagtcgataaatgatttcagccaacgcatataccactgttggcttattgaggtgtaaacggcaaacactggacgcacaggtaaaaacagtccaagcaaaatgccatcaataaaagagacgtgattaggcgtaattagaacgcgctcgcccttcagtgcctgggtgtcacccgtaacgcgaacgcgatacaaaacacggcacaaatttcgaaaaaagctaaaaagcattccaactccctttgctctgattcagtaaaagcgaatggagggagattacacgagataaagaacgcgagcgacagtaaattaggtgcgaaaaaaaacctgcgcatccgcgcaggttggtgcaagagacagggtacgaagagcgtaccgaataatctcaccaatcaatacctctgggatcttgattgtggtctgcacgacgactcttcgccagcgagaaaacgcaaaggaatgaagggaaatgcaacgaggtgtgtaaattgtcggttactgttacagattgatgaccggcaaaaaaaacctgcgcatctgcgcaggctggtgtaattcatgtgctcaacccgaagttgacttcacctatcaatacctctgggatcaccactttagcaacctgaagccaaacgccaccagcggtcaatcgcaacagcgtttcgcaaagtgtaaccaaaggtttgcaatctctttttttgtcttacttatttgcgtttggctcacattcccacgatgaaaacacgccaccccttgaaccaacgggcgttttccgtaacactgaaagaatgtaagcgtttacccactaaggtattttcatggcgaccataaaggatgtagcccgactggcaggcgtttcagtcgccaccgtttcccgcgtcattaataattcacccaaagccagcgaagcttcccggctggctgtgcatagtgcaatggagtctcttagctatcacccgaacgccaacgcccgtgcgctggcgcagcagactactgaaacggtcggtctggtcgttggtgatgtttccgatccgtttttcggtgcaatggtgaaagcggtcgaacaggtggcttatcacaccggtaattttttattgattggcaacggttaccacaacgaacaaaaagagcgtcaggccattgagcaactgatccgccatcgctgtgctgcgttggtcgtccatgccaaaatgatcccggatgctgatttagcctcattaatgaaacaaatgcccggtatggtgctgatcaaccgtatcctgcctggctttgaaaaccgttgtattgctctggacgatcgttacggtgcctggctggcaacgcgtcatttaattcagcaaggtcatacccgcattggttatctgtgctctaaccactctatttctgacgccgaagatcgtctgcaagggtattacgatgcccttgctgaaagtggtattgcggccaatgaccggctggtgacatttggcgaaccagacgaaagcggcggcgaacaggcaatgaccgagcttttgggacgaggaagaaatttcactgcggtagcctgttataacgattcaatggcggcgggtgcgatgggcgttctcaatgataatggtattgatgtaccgggtgagatttcgttaattggctttgatgatgtgctggtgtcacgctatgtgcgtccgcgcctgaccaccgtgcgttacccaatcgtgacgatggcgacccaggctgccgaactggctttggcgctggcggataatcgccctctcccggaaatcactaatgtctttagtccgacgctggtacgtcgtcattcagtgtcaactccgtcgctggaggcaagtcatcatgcaaccagcgactaaccgcagttaaagcaattccagcgccagtaattcttcgatggtctggcgacggcgaatcaaccgcgcctgaccattatcaaacagaacttctggtaacagcggacggctattgtagttggatgacattgatgcgccatatgcccctgtatcatgcagtaccagataatcacctgccttcacttccggcaaggcgcgggtttcaacatttcccccttcctgctgggtaaagacatcgcccgattcacataacggtccggcgacgacggtttccaccgttggcgcgtgttccagagaacgaccatcagctgccagggcactgatatggtggtaactaccgtacattgccgggcgcatcagatcgttgaacccggcatcaaccagcacaaagtggcggctccccatttgtttgacgctccgcacctgagtaattaatacgccagactgcgctaccaggaagcgacccggttcaatttccagtttcacagggtggcccaaatggcgggcgatttgctcacgcgcggcattccacagaccataataatgttcggtatcaaccgcctcttcaccctgttgataaggaacagaaagcccaccgcccgcagaaatagcctgtaaatcctgaccgaattcgatgacctgacgcaccatagcaccacacacctgttccagatgggcataatcaacgccagaaccaatgtgcatgtgaatgccgaccagctgcagatgatgacgttgtatcacgtccagtgcggcgggcagatcggtgtaccagataccgtgcttgctgttttcgccaccggtattggttttttggctatgtccgtgaccaaaccccggattaacgcgcagccatacccgatgccctggcgaaacctggcccagttggtcgagcatatcaacagaacccgcattcaccggaatttgcaattcactgacgcgttcaagcgtcgcctgatcgataacatctgccgtaaaaacaatatcatcggggtgcgtttgcggattgtaacccgccgccaacgcacgctctatttcgcctaacgagacggaatccactttcacgccctgctcacgcattaagcgcaaaatatgaatattggaacaggctttctgtgcaaagcgcaccacatcaaactgtttcagcgctgcaatctgccgacgaataatttgcgcatcgtagacccacaccgggcagccaaattcagcgggcaaacgcagcagattttcggcggtgagatcggtatcggtgctgaacagtgaatgtggcataacaaactccagataagtgcttttttatgattacgccacatcataaaaagaataaaaaatatcgatttatgtcgagtctatgcaaaaatgatatggattaccggattgcgagagagcgctaatggccgccgttaacttacgtcatattgaaatttttcatgcggtaatgaccgccggaagcctgactgaggcggcacacctgctacacacctcacagccaaccgtcagccgcgaacttgcgcgctttgagaaggtgatcgggctgaaattgtttgagcgcgtacgtgggcgattacatcctaccgtgcaaggactgcgtctgtttgaagaagtgcaacgatcctggtacggactggatcgcattgtcagcgccgcagaaagtctgcgcgagtttcgccagggagaactgtctattgcctgcctgccggtcttttcgcaatcttttttaccgcagctcctgcaaccctttctggcacgttatcccgatgtcagcttaaatatcgtgccccaggaatcaccgctacttgaagagtggctctcggcccagcgtcatgatttaggactcactgaaacgctccatacgcctgcgggaacagaacgtaccgaattactctctttagatgaagtgtgtgtgttacctccgggtcatccgctggcggtaaaaaaggtattaacgccggatgattttcagggtgagaactacatcagcctttcccgtactgacagctatcgccagttgctggatcagctatttactgaacatcaggttaaacgacgcatgatcgtagaaacccacaacgccgcgtcagtctgcgcaatggtacgggcgggggtaggtgtttcggtggttaacccgctcaccgcactagattatgcggcaagcggtttagtggtgcggcggttcagtattgcggttccgttcaccgtcagcctgatccgccccctgcaccgcccgtcatcagcgctggttcaggcgtttagtgggcatttacaagcggggttaccgaaactggtcacttctcttgacgctattttgtcgtcagctacgacagcataaaagcgacagcatcctcggcatggatcgccgcggtatcaaacacaggcaaaacactgcgctcttctggcaccagtaaaccaatttctgtgcagccaaaaatgacgccctgtgcgccctgttctgcaaggcgagcaatcacttgcgcataataagcgcgtgacgcttcggtaaattgccccagacacagttcttcaaaaataatctgattaattttcgcccgttcatccgcttcaggaataagacaattgatggaaaattgttccgtcagccgcccgcgataaaaatcctgttccatggtgtaacgcgtacccagcagcgccacacgagtcattccggccccggtaattgcacgtccggtggcatccgcaatgtgtaagaaaggcagagtgcaacgtgactcaatggcatccgccactttatgcatcgtattggtacataacacaataccttctgcgcccgcccgctgtaagccaagcgccgcctcagccagaatgtccccggttttatcccattccccgcgacgctggcactcttctatttcatgaaaatcgacgctatgtagcagcacttgcgcagagtgaagcccaccaagccgctgtttaatgccttcatttatcaaacgatagtaaggaatggtggattcccagctcattcctcccagcaaaccaattgttttcattcctctctcctgatgtgtgttaccgcaacaaggctgaataaggaacgagacaaacgcctcaacggccaagtgcccaatctctattaacgaaaaaagggccggatgtacagcacatccggcccgtgaaatcagacgccgatatttctcaacttctcgcctgccatcagtttgcgttcgatatgttccagcgtgacatttttggtttccggaatgagccagaaagtaatgcccacaaacgcaatgttcagcgcagtgtagagccagaacgtaccggcagcgccaatgctatcaagcagtgtcaggaaggtcgcgccgataatcatattcgacacccagttcgtggtggtcgaacaggtaataccgaaatcgcggcatttcagcggctgaatttcagagcacaggatccacaccactggcgcggcgctcatcgcataaccggcaatacacatcatcgtcatgccaacagagagccaggacaagccactggaagccgtaccgttatcaaactgcatcaggcaatagcccagcaccagagtgcctaacgccatcacgctgaaaccaattttcagagccggtttacgccctgctttatctaccgtaaacaccgcaataaaggtggcgaacataaaggtcagccctacgaccagagtcgcaatcatctgttgttctgtggtcgtaaagcccgccattttgaagatacgcggcgcgtagtacatgatgatgttcataccggtaaactgctgcatcgcctgcaacaacataccgagaaacacagcacgacggacgttacggttgatcttaaacagtgcccaaccgccctgttttaacttcaggctttcacgaatttcgttgagttcttctcgcgctttttccgacgtatcgcgcagcatacgcaatacttcttccgcctcaatatgacgccccttttccgccagccagcgcgggctatttggcaggaagactaccagaataatcagcagaactgctggtaaagcaagaacccccaacattgcgcgccagttaccgctataactgaacgctgtatcggataaaaacgccagcacgatgccgagtgtgaccatcaactggtacatactgatcatcttaccgcgaacgttttcacttgccatttcagaaagatacagaggagcggtgtaagacgcgatcccgacagcaatgcccagcaccacacgagcggcgattaacatctctacgctggtcgcaaaagcggaccctatagaaccgagtacaaacaggatggcccccgccatcaggctgtatttacgccccaggcggaacgacagccaaccattaaacagcgcaccaattgctgcaccgagcatcatgctactaaccacccattcctgcaaacgactggtcagcacaaagtgatcggtaatgaacggcaacgctccggcgattacgccgatatcaagaccaaataacaatcctgcgaccgcagcagctaccgaaacaaacatattcatacgccgcgtatcccgcaaagaacgtggcgttaaagcagattccgtattgatagtaaccattttttcctgccagcagagagtaagacatagtgaaaaaatacgtgaacaactcacgcaggtgtcaggtcggaaacagcataaatatggattaaattgctgcgacatgtcgttatgtgatggatattccaattttcaaattaagttgaattattgagattattattaaccacctaattttacagcagataaaattcataaagttcattaattgataattaatatggattatttcataaccatgatatggattatgatgatctacaggtataaaaaaccctgccatgcggcagggtcataaaagtaagaagaatgaattaacgcgccagccaaccgccatccacggcaatggtataaccattcacataatctgaagcgctggaggcaaggaacactatcggccccatcaggtcactcggcagtccccaacgaccagctggaatgcggtcgagaatttccgcgctacgttgttcatctgcccgtagttgttgagtattgttggtcgccatgtaacccggggctatcgcattaacattaatgttgtgtttagcccattcgttcgccatcaatcgcgtcacacccatcacgccgctttttgatgcggtataagaaggcacacggatcccgccctggaaggagagcattgacgcgatattgataatcttgccgccattgccttgcgcgataaagtgtttcgccgctgcctgagacatgaagaatacgctcttgatattcaggttcatgacatcgtcccagtccttttcgctgaactcgagagcatcttcgcggcgaatcaatccggcgttattcaccaggatatcaatatgaccaaactccgctaccgcgcgatccagcagtgctggaataccatcaatctttcgcagatcggcggtcaggcttaaaaaacgacgccccagcgctgtgacctgctcgatggtttcagtcggttcaacgatgttaatgccaacaatgtcacagcccgcttgcgccagccccaacgccatcccctgacccagtccagtatcacaaccagtgacgaccgcaactttaccttcgagagaaaatgcacttaaaatcataacaataccttattcgtttatgcccacaactagcgcaaatctttaacggccacatggtccatatcatcaaagacctggttttcaccgaccatgccccagataaaggtataagctttggttccgacaccggaatggatcgaccagctcggggagatcaccgcctgctcgttatgcatcacaatatgacgcgtttcttgcggctgccccatcatgtggaaaacgcaggcgtcatcatccatattgaaatagaaataaacttccatccggcgctcgtgggtgtgacacggcatggtgttccacaagttacccggagccagctccgtcagccccatactcaattggcaggtttccagtacatccgggacaaaatatttgttaatcgtgcgacggttactggtgaggttatcgcctaacgtgactggagatacttcgtccggtgtgacttttttggtgggatacgtcgtatgcgcgggtgcgcaattgtaataaaacttcgccggagtgccggtatcaatactggcaaagacaacttcttttgcacctttaccaacatacagggcgtcgcggtgaccgatttcatagcattggccatcgacagtaatcgtaccggcaccgccaatattgataacacctaactcgcgacgttcaaggaaatagcttacgccgagttgtttaccaacttccccgccaacggaaaccgttttagttatcggcataatgccgccaacaataattcggtcaatgtggctgtaaaccatggtgtactcatcggcgacaaataccttttcaaccaaaaattcattgcgcagcccttgggtatccagcgtttttgcgtgcgcactgtggatgctctgtcttacgtccacatcaacctccgataatcagtaaagcgtgaaaatagaaaacgatagtgaaacactgtttcgttttctctataaagggatgatatgcccatgggctagggttttcaattaaaaataaaacaatgtttcatttttaagttaaggattaaaaaaagtgcagtgtcgatcacgaatatgtcatgagaatggaaaaatgagggagcccagaaaatgtatgtcgacttgccagccatcattattcaacagattaatgacggcagatatttatcggtaaggaggaaatgcagagctattcgtcacgttcaatggtcaatgccacaccctggcccccgccgatacaaagcgttgccagtcctttgcgggcattacgtttcaccatttcatgaaccagagaaaccaggattcggcaaccggaagcgcctatcgggtgaccgagtgcgatcgcgccaccattgacattgacccgacgctcatcccactcaagcatcttgccaaccgaaagcgcctgtgcagcaaacgcttcattagcctcgataagatcgacttcagccaactgccagcctacacgctccaggcaacggcgggtcgcatacaccggcgcaattcccatcaatgccggatctacaccaacgctggcaaatgcgcgaatgcgggccagcacgggtaaattcaacgctcgtgctttggcttcgctcatcatcattaccgcagctgcgccatcgtttatggatgatgcattacccgctgtcacagaaccgagactatcaaatgaaggatttaaacgggctaagccttctgcgctggcgtcagtgcgtggctgttcatcggtatcaacaaccaacgtctgcccgttactttgggtcattaccgggacgatctcatctttaaatcgtccggcgtcaatcgccgctcgcgctttttgttgcgagctaagtgcgtaagcatcctgcaactgacggctgatgccatattcgcgagccagattttcggcggtgacaccaatatgataatcattgaaggcatcccacaacccatcatgcacaagactgtcaaccaactggctattgccaagctgtgcaccggtgcggctatcagtcagaacatgtggtgcgcggctcatgttttcctggccaccggcgatgacaatatcagcctcgccacactgtatcgcctgagtagccagatgcagtgctttaagcccggaaccgcaaacgtcattaatagtgattgcagaaacgctattaggcagaccacctttaatagccgattgccttgccggattctgccctgcccctgcagtcaacacctgaccaagaattacttcatccaccgcatatgcaggaacgccggtacgttctattaacgctttcacgaccagactaccaagttccacggcggaatgacccgctaacgcaccacgaaagcagccgataggtgtccgtaacgccccgacaatcacaacgtctttcatcacaacctcgcaccaattaacagtgcaatagtaaatgattgttaattacagttatcttaattgtttaaaaaagtgatttttatcacaaaggaaatatgcctgagcagcagtcagagacataactggcacgtaaggtttgcaaccactaacccaccaatagaggggtagatagggcgttaatctcccatacttaacctggtttatggtaaattgccctccattttgtttaatttgtagatgatacgttcagataatgtctaatatttggtctaaagaagaaactctgtggagtttcgcgctctacggcacagccgttggtgcaggcacgctcttccttcctattcagttaggttcggcaggggctgtggtcctgtttattactgctctggtcgcctggcctttaacatattggccacataaagccttgtgccagttcatcctctcatcaaaaacatcagcaggtgaagggataacgggcgcggtaacacactactatggcaagaagattggtaatctgattaccacgctgtacttcatcgccttttttgtcgtcgtgttgatatatgcagtggcaattaccaactcacttacggaacagctggcaaagcatatggttattgatcttcgcatccgtatgttggtgagtctgggtgttgtattaattctgaatctcatttttctgatgggacgtcatgccactattcgggtaatgggatttttggtattcccattgattgcctatttcttatttctttccatttaccttgtcggtagttggcaacctgatctattaacaacccaggtagagttcaatcagaatacccttcaccagatatggatatcgattcccgtgatggttttcgcctttagccatacgcccattatttctacgtttgccatagacagacgtgaaaaatatggcgaacacgctatggataaatgcaaaaaaattatgaaagtcgcttatctcatcatctgcataagtgtactgttctttgtctttagctgcctgctttctattccaccttcgtatattgaagctgctaaagaagaaggggtcaccattttatcggcgctttctatgctgccgaacgccccagcatggttgtcaatttccgggattattgtcgctgtagttgcgatgtcgaaatcattcctgggtacgtactttggcgttattgaaggtgccacagaggtcgtcaaaacaacactacagcaggttggtgtaaagaaaagtcgtgcatttaaccgcgcactatcaattatgttggtatcgctgattaccttcattgtttgttgcattaacccgaacgcgatttcgatgatttacgcgatcagcggcccgctcattgccatgatacttttcatcatgcctacgctgtcaacgtatctcatcccggcgcttaaaccctggcgttccatcggaaatctgattacgctgatcgtgggtatcctgtgcgtatcggtaatgttctttagctaatatcagttgtggatggttcaaaattgctacaattttgaaccattccatttttcataatattcatttgttattattccaccctatcacttctctcgtcatatcctagtattatcagttagttaaacacacaaagagatctgaacatcttaaataagactatttaagatgcataacttagattcgcaagatatcttctggtcattcaaaaacaatttgcgatatagatattcttataccatgagatagttatctggaccgctctcaaccatgcaagattaaatcagtgaaacataatcatatttgataacgagaaatgcatttttaaatgccttactcagaattatagcaaatacagattaatcgcaatttttcccggcaaaattacaaaatcatggtgtattgacatcatcaataaccaatgaaattatgcaattatatacggatagggaggttcttaacatggggctttgtagtcgttataaaagtcttacatgcaatagttgctcaatgcattgccaaataatgccagaagagtcaccgcgtttgcagtattgcgcaaactcgtgtttttgtatgtggcccgaagaaagttcatattttaatcgtggtgtggtagaaggtatcttaacaaaaaaccacaatgcgagattaagcggatatatttttgtcgatttttcagtaagttttttacgtctattccttgaaaaagactggattgactatcttgcaagtactgacatggggattgttttagtcagcgaccgcaatatgcaatcgttagctaattactggcgaaaacacaactcagcaatatctgctgtcatatataatgatgatggtcttgatgttgccaatgaaaagatcagacaactatttattggtcgttatttatcatttaccagaggtaacacattaactcagatggaattcaccataatggggtatatggtttctggttataatccatatcagattgctgaagttctggatatggatatccgtagcatctacgcgtacaagcaacgaatcgaaaagagaatgggtggtaaaataaacgaattatttattcgttcacattcggtccaacattgatactcaacgaccagccagaatcatactctgtttatacgggcatttattgaaatgtccgtattttataaataggccgtcccctcaagagtaaacaccatagtatttaaaaccatcacacgaaaaattcagaagcattacgaaatatgaatttacaaacaatagtggcataaatgttaaccatgttaatttacgtaaagttttacgttgcaacattaaagcctcatttcaatcatcatgataaatataaaattaatatatatttatgccgtaaataccaatatacttagcaaactatgtgatctccatttcgattgatttagtgtttattgacgtatgtactggattattaacgataatatcgagttctggcctgagcaccgaaaattaatatcggtacataacgccgatcttaacgtcgttctgacaacgccagccagtcgatgtttatcacttctacttgaagcttttcctgatgtggttgcacaacaagattttttcaccagagtctgggaagaagaaggtatgcgtgtgcctactaacacgttatatcagaacatatccattatcagacgcggatttcgcgctgttggtgatactacccactcgctaattgcaaccgtgccgagaagaggattcaagatccataatgacattaacatacaaaatcatgtaataaactcgtcaacagacgcacatacacacaatgcccacctgccataaaagttaatgcgggatacaaagagagcattggtggcgcaaagaatttcaataacaaaatcctcaaacatataaaaagtcatctaattatgttgagcgcatttgtcataggcgcatattctgcatattggctatggaataataatcaaccgaagccatttttcaaggattacaagactgttgcggaaattaatggctgccattttaatgtaacagaagatacaattgatgggttgaaagagttcgataaatataaaacacggatactggattcggggattaactgtaaaaaacatccgtggttatacttccctcttgcaaaatcctcaccggggatgattgttatggcatgcaataaaaactataaccaacatgaagtggcaaactgtttaaccctgtcttaccgtgaggttaatcgtgattgattataaaaaaaacttattatttattttagtttttatcagtgggtttattctcttcactgtctattcttacactgcagaaaaaatgatatataacgaaacatgcactgcaaattgggtaatttttaatgaccagggacgagcaaatcttaccatcgactttatgtataacaaaaaaaataaaacaggaactgttgcgttgagtggaacctggcaacaaggtaacagagaaagtaaatcaatacggcgaaatattgaatacacatggattgaaaactatgacacagcccatttaacatcaaagaaagttaataagtttgagattatggatcaagttgatgatgatagacttgcacaacttattcctgatttttatgtctttccagaaaaaagtgtaagctataatatactaaagcaaggtaagcatgcttttattttgagcattggtaacagagcaataatgcattgtgcaaggtaaactaaaatagataacaaaaagatggaacctcgttaatcataaaacaataaaattaaatattctcgcagtatatggcagtctaaagcatcaaagatttgatcaacatctttcattttagacatctccttgcaatgtaaaatatcatgtatcaacaacatctggtgcaaatccatgagtcgaactcgacattcatcttagctcgattattattccttcgtacagtcgatgtaaacaatacagaaagaggattattaagaaccagtttactcagtgaatcaatagaggaaaggactaacgtttctttaaaagaattgatttcatcatctgttaaactaaactcatcattgacagatcgtgagatataactgtttttaactttactctttacgttgactttattgacagaattaacattcacatatcttgaatttaatgtccatgatgttgtttgcgtgagaacattctcagcattaaggaatttttttaacggaatccttggtttctttttcgagtccgaatttacaatatcatgcatatagaccatttcatgaatctgcgaaaattcaatgtccattgtatacctcacatttttaccgtgactcgatgttactgttcaataatcaccttccatcaatactaaaattaatacccctaatgtgccgataacaaatatagtcattctacgtaacgtctccataaggtgatatttgacattatcagaagctgcgaattcggattttgctctaatcaaatgagagaaatgtaaaatgaagccacgaaatattaataatagcctaccactgcaaccattagttcctgatcaggagaacaaaaataagaaaaatgaagagaaatctgttaatccagttaaaatcacaatggggtctggtttaaattatattgaacaagaatctcttggaggaaaatatctaacacatgatttgtcaataaagatagcggatatttctgaagagataattcagcaagcaatattatctgctatgagcatatataaattttcgataacagatgatttaatgagtatggctgtaaatgaactcataaaactgaccaaaatagagaataatgtagacctgaataaattcactactatatgcacagacgttctatccccccgcgtcaccagacataataaagaaaaaaacaaacgacattctacccttctcaaaaatcccctttttaattttcattgaaaaaatggcaattgatactatgaatccaggtcatacacattaaggcatttatgtaatgtcgtaattaagataactaataaggtgaatattagtaaaacaactaatgatgttattagtttgtagtgaacagtactttcaccaataatgaaaaatataccataagcaatgcaagcttaaaactcataatttaaaaaagataaatataaaaatatcaatgagtcaatcaataataatttgacatcacgagacacatcacagaggaatattatgagcacagaaacaattgaaatattcaataatagtgatgaatgggcaaatcaactaaaacacgcattatcgaaaggagaaaatctggcattactacatggtttaactcctgatatccttgatagaatatatgcatatgcattcgactaccatgaaaagggtaatataacggacgcagaaatttattataaattcttgtgcatttatgcgttcgaaaatcatgagtatctaaaagattttgcatcagtatgtcagcccaaaaagaaatatcaacaagcatatgacctttacaaactaagttacaattacttcccgtatgatgactattcagttatttatcgtatgggtcaatgtcagattggggctaaaaatatcgataacgcaatgcaatgtttctatcacattattaacaattgtgaggatgatagtgttaagagtaaagcgcaggcatatattgaactcttaaacgataattcagaagataatggctaagcattacaatcatttggttaaatttgctggttatagtgcagttaaccactataaccagcacctcttatgttttcttaaatcagcatcttaaaacagttaagagcatactataaatcattatttttcaatgcgttagagaacaatctactttatcaaaattgaataaggctatttcagattacatcactgaattcctaagataaattagtgaacacaaccatagatatgtcaaatgtaatttcctgtagcgttaatgacacataaatatgaatagccataatttctattgcttaagcaggatgcaagaaaccaattttttcatagaggttaactaatggacttagaaaataaattctcatatcattttcttgagggattaacgctcacggaagatggaattcttactcaaggaaatgagcaagtttatattccacagaaagagttaggtgtattaatagtattacttgaatccgctggtcatgttgtactgaaagatatgatcatcgaatcagtatggaaaaatattattgttagtgacgagtccctgacaagatgtatctattctttgcgctgcatttttgaaaaaattggctatgatcgttgcatagaaacaatctaccggaaaggttatcgtttcagcgggcaggttttcaaaactaaaattaatgaagataatacttcagactattccatagctatattccctttcactacttcattgaatacactggatccattaatacttaatcaggaattagtgcaaatcatttcaaataaaaaaatcgatggtctctatacctatccgatggctgcgacaaatttttgtaatgatcacatatctcaaaattcattcttgagcagattcaagccagattatttcgttacaggaagaataaaccagaataatgcagtgaacactttatacattgagttgatcgacgctaaaaaccttttcctcatcgccagtaatcatctccctgttgatgaactacataatacatcacaatttattatagataatatccttcaaacggtacataaaccagaacgatctgtaagattagctaagcaggaccaaggatataagaatcattatttatcagatgaaatgttagccggaaagaaagaactttacgacttcacccctgaaagcatttacagggccatgactatatttgatagattacaaaataaaagtgatatacagacgctaaaaacagaatgttattgccttctagcggaatgccatatgtctttggcacttcatggaaaaagtgaacttgaacttgctgctcaaaaagcattagagcttttagattatgtatcagacataaccactgtcgatggaaaaattttagctattatgggactgataactggtctgtctggacaagcaaaagtatctcatatcttatttgaacaggctaagatacactcaactgatatagcctctctctactactatagggcactagtccactttcataatgaaaaaattgaagaggcaaggatttgtatagacaaatcactacaactcgaacccagaagacgaaaagcagttgtgataaaagaatgtgtagatatgtatgtgcctaacccgctcaaaaacaacattaaactctactataaagaaactgagagtgaaagccatcgagttataattgacaacattttgaaattaaagcagctgacgagaatttgtatgcgataaatttttattgacgcaattttattatttagatgtatgcaacttgttatttaaacaacagagataaaaatatctaagatattcaccttattgcaagatatttaaaatgctctagagttaaaagtatgatgtaaagaccattggcctggacaattaaaaaagggagctttatgactaatccaatcggtatcaataatttatctcaaagttcaaatatagcgaatgcaacgggtgatgaagtcgtatcattagataaacacatcaacaccagtgctactgatacagatcaaatacaagcatttatagtttcaacatggatggcgccttttcaaaatgatatgtattcagaagataatcctatctcaccttactataaaattgagtggtagacgattgaccaaataaatcataacgagatacttttataatagtatctcgttcctttcattcaatcctcacacatgaaaaaatatgcgctcaccaaaagttaaattcttaaccatcttcacgttttgtatatttattacaaaaatgtctttcgccagcaactcttgctctaatgaagcaggaacaatgttcagaatcgaaccaaatttaattaaagctatcgctcttgttgaaagcaatctaaaaaaggatagcataggcaagaacagagataagaataacaatataaagagtttagattattggttaatgcagataaaccagatgcatattcccctgttaaaaaaacgtggaataataaaagatgaacgagatttgttagataacccttgcctgaacattaaaataggaaccgagattttatataaccatttttcacgttgtggagtaacgtggcaatgcctggggacttataatgcgggttttgcaatggataaccaaaaaaagagacagcaatatgccccaaaatatatattgtatataccaggcttaatgaactagacaatcgtaaggcttcagcaaaatgagcctaaagcctcttttttttatatagtgcaaacacccatacgtaaagctgttttgatcaactcgataccactgtgaacatctaatttcttcatgatattgagtctatgagtttcgactgttttcctgcttaactgcaagaaattagcgatttctttgtttgttttaccatcagctatgagttgtaatatttctgactcacgatttgtaagttgattatcagaggaatacctggaagatattttttcacaatccatatgtacactatcaaaataagtgtaaccattactaatcgaatcaatagcacgatttagtttcgccgggtgactggttttccatacgcatcctttcgcacctgcttcaagcaattttattgaatcaatatacggcatctttgctacaaatgtaataatatgagcatctatcttatgcgatttaacccattttacgagttcggcccccatcattccacctgcaaattctcctaaaataaatatttaggctgtagatttgttacactccgctatagctttcttcagatctttatagcccccaacaacctcatataaatcaggataatgtccgagaaatccaattatcccatcaatcataaacggctgctgatctgaaactacaattttaatttttcccatatattcatcctgagtgtaaatgctttaacgcattcatttataatcatcccttccattattattataagcaaaatccaaagaatacattgatgaaataataatgaaatataattaaaaataaaatttttgcgtaaaaaaataccacaggcattaaaaaatcatgagatgattaaaatattacaattagattatattcaaatcattaaacttgagccagggagctataagtcctcagggcttgccaaaacagaattattcatatccaaagaatgtgtttcaaacattttttcaactaaataatgtctggcttgttcgcagatttcgttaaccttgtcaggggagaaacaatgattattaattaaatattgctcacaattatccacaaattcctgcggactaaattcagcaataaattgatcggtaaaaaacacaaaacgcttatcatcatgaaatgtaatatggacattccatattgatttgtcgacaaaatatgactctacttcaagagacttatctttgaaactggtaggtatatggagatttacaggacctgatattgatggtaattttgttacccaactttcaaaaattttgataaaaacatcaacttcttctgaaggttttaacaatatactcttcagatcgtttatcatgtttattcttttttttcaagttctgagcatagcaagcttatcaagggtataaaattatccatctcatcaataatgccttttgtatagccatcataataaccttgaataaatttttcttctctcttttcctcaatactctgaatttttgcggtggtttcaagaaggattttttctttaagagaaactatttctttcaatccatcagaaatttttcttttaatcacaacaccatttgcaggagattttatcaagctcatctctattttttttcgcataaaatgtaattctctctaaaagtgttgatgcaagtggtaacggcgattgtatgtggtcaacaaaatcaggaaataataaattaaatcgttgctgcattgccaatggttgttgccttatatagggtaacaacgttgaaaaaccacatgtgatgatattgtgatagttagcgatgccgggtttgtatcgtgccttttcatttatttccagcggtatagctgataaataatcccttagtacatcaggaaccttataaaaaaacccgcgttctgcaaacctttctcgataaaagtgacaaccactgagtaaacagatcaatggaagtaaattccaattgtttatgtagtaaataagtgaactattcagattaaaatgttcaactgaaagattatactgcaggagaatcatttcattggtaatagatctcagcaccggattgttaataggtgtattattcaagcttactcgttgagatgaatataactaattggatcatatataatctttcttagggcaagattcataacgttctcatatgtctacttaattttcaacctgactaaattagttagaatggccctatacttccataacagccagcaagtcgctacggatattaatgcaagtaagatagaaaccggcatagccttatcataagcaaaaacaggttcgctaatttcatatgttggtgcttgctcaataatgtctcttcgttttgacaatacaacagaaatattctcatattgtacgcttgcaaaactattaacaataaatctctttatgtcatttatttttatttctggattgatatctttttcatatactgcaagtacagaaatatgaattggtaaagcagttttaccactatcgccagtatcaacatcgtaactaacatgtactctcgaagaaacaataccatccataattttgagagattgctctaaccgctgctcaatagcagaatatagccttgctttttccgctcgtggagatgaaacgagtgcatctgcagggaacatctgcgatatttgaatatcaggcttacccgggagattgtagatttttagccaatccaccgcagaagcaaaatccgttggttcaacatagattgagaatccagttttgccttgatccttcttttcagcattaatattatgtctttgtaaaacagcaaggacatcattagcttgctgttgatcaagatggttcagtaattcctgctgcttgcagccgcacaacagcaggataaacaataataatgatatatatttcatgagcgggtcaacgtctcaactgcagcgacaatttttcttgctaatgttcccaccaatgaaacctcgacattataattaagcacatgatcctgcaagactaataatttttcaggagttaatccttttttatcagacgttaatgcttgtaacgcattttgctgccaattttcagtttgtacagcatagttagcaaaagcggagatcattttatcatccgggttgtcaagattgagaacccggtcatttaaatcaatcactttcgcttgctgtatttcatgagcagttgattgctcagctctatcaataggtggcatattgcttactgacataataaaatccttatccagtttagcggaagttttgtatgattgccgaatcaagatctttatacgcttttacaacgttagattgcgcatttcgatataatgtatactcagctaatgcactttgatattcggcaaggaatttcgggtcggaaggattggttgctaaatcctccaacgctttttcaacttgctggttcagatcatcaacgccctgatcaaattgtttgctgatgtccataatataaccattccaatctgccataagtcttcctcaattattcctgaaatgtccacttgctaccttgagacttctcgaatcggttatctccgtagctaaatgaactattatttgtgtcctgatttttcaaattcacattaaatcttacatattgtttaccccattgtttataatattcgtcaacatagttattaattttatttaattcactgtcacttaacgtaccaatgatattgaaatacacattgttagctgttttatatttttcataagaaagacctatcgctgacaacgtttcaatagcctgactttccaatacattatcatctaataccgcaatacttatattgctggcatatggcatagtttgcagtaatcctttaataagattatcgattagttgctgtgtgatagcgttccgttgcttactcactgtcaatcttagattactggcatctaatagttgaagtttaaaatattgtaaatcagggaaattatcagcaagccatgaaaaaattcgtatcgattcatcatcaggatttatcacccgtactggctttcctggttgattttttttccagtgcttgtttgacccagactgcttcatccaaaatattggtattaatatagataacatgatctctaccatataaaatttcataattcctgtttttgtttacaagaattttatcgatatgtctcagctgcggatcattactggcattaacaatataaaaagcaatgaaaatgatagcaaaaagaaaaaaaagcattacatacttaaacagcttactgctaaagaaatgttgttttgtagaaataatgttattttcaataatgcctggcaatgaatactgccaaacttcatttttttcttttacagcaaatttgagacctaaaacttctatttgctgattcaatgttaacgttctatcttcaggttcttgtgctgttaattctctgaatgttactaccagatcagggtcggtagtaattattatctcaaaactacctgtaagctcgccataaggaacgactattgtgttttctggtaactcagaaaaagcatcacttcttcctaacgaaacatcattaccaatgataacaagtagacgcccattaagtatttcatactcgcatccattcaatggtccgctcaacaaacgaatggcataagattccaataagtcttgtgataagaatttatcattattttccatgaatagcacccgctaattccataagctctagtttagagtagtgtaacaagacggaaatttcatgaccaaaatatgatgacacagaataaaaaattataatttcgaggactattttaaatgcctctatgcataactttatttacaatttaaggtataaaccctattcccccaatgttaagcaaatataacaattactcttattttaacttttacacgtaatatttaccctaaatgattttagagtacaggttggcatatgcaagtcttttccagtgatgtctacttcactgtagtcactaatgcattattagcatcccaaaaagaatattacagcgatttagttgcgttggttgatcttgggcattcattcgttgttattgatgagcatcaacatcgaaatctcaaaccaaatacagaacctgtaaacatccttttaagcaacaatttcatcaggatcaataagaatattagattatctgatttaacgcatttcctgatttcgaatcttcatacacaaaatgtgtattccacacaagaagcacttacccatgatgatatagatatcctgcggttatgtgtttcttactcgttaaaacaagtagccattattaaaggaattgattataaaacagtatcatatcacaaaataagagccctaaataaacttaacataaaaggtactgttgagttgtttatagcactctgtgaatgggataaacattattttaaactccaatcttgcgtaagagaaagttgatatgtcattagtaggatataatagtaaaatcataataaccatcgcgctgatatcgttgctctctgcatgcaccagagaaaattcattaaaggagaatcaaaataaaagaagtggcgaatcccaagcgatagtagatgcaagacagttctttagcgaacacccggaatatatatctacagcagaactggagcaaaagctatatcgcgaatttgcacaggttactacagttccagcttataaagagatgagtatgtatcaattgcttgtcatttcacaagatcatttaactcattaaataatgaatctacacggtttttgcgtgtagattcttataaatttctgactacgacagatgtttaattttttaaattatcgtctttattctcgatttctttctcttcaccttcaatgaatttatcttctgaagagagctgttcatctggaacaggttgtccagcattctccacatcttcaagccacagcagaagacgtaatatttcatctatattttcgaagctaacataatcgtagcgacgatgggtagcataaatttttcgtgctaattttttatctgtgataattggtattccgatttcctttgcatatttccttacggctaaggctacctcattagtttctcttacagaaatcaatggaataggtgaaagatgtggcttaaagtatatccctattgcaatgtgagtagggttggcaatcatcaaacgactattactgacatcagacttcaattgctcagaaagaatttcctgatgcgctctctgcgtttagacttaatttctggatttccttcttgctccttgtattctcttttaacttcttgtttatccattttcatatctttcataaataaaaaatattcagcgataaaatcaaaaattaagacaattatcatactgccgagacaatacagtatgagaaggaatagcatctctccccaatctgataataaagatatgatatctccatcaagagttttaaaaagcagtgatttatgattactccaaaatactttgatcgccaatgcaaaaaaaaataatataaagaattgctttaacagattcttttacggtttttaagccaaatatacgctttaagccatttactggattcaatgaatcaagcttaaatttaacagcttcagttgctaattgctttttactttgaaaccaggagacaagtattgttgtgaacatgcaaaccagcaaaaaaggaatgttcgttttcaaccaaccaacccccatagctttaaaatagtcccaaatatctggtttagcgttatgatcaaggatgtattcaagaatcgacataatgtgatgcacatcaaaaacatatccgagatataaagtacccacaagcattattacagagatggttaagtctctactttttagaatttgcccttttttagaagcatcctggagtttcttttgtgttggcttttcagttttattggccatgaaacactctatttctcaatgtatagttgcaattgttctgggaaaaaggataacggcattactcgttcagccagtattgggccaaaataaataattaatattaaaaatgccagcgcacttttgacagtcagtgaaatggcaaaagcatttagttgtgaagcataacgtgccagcaatcccaggacagcctcaccgcccagcataacggcaatcacggggcttgcgtaaacgatagtatgagtcattatgttattaatatatgagaataaaggctctaatttaggaaaattaaaattgcctgaaggccataaattataactttgccaaagagtttccagaataaagttcattccacctttagtaagataaaccgcagcagagaaaaggttaaataatcttgctaattccgaggtatcgacacctgtagccggatccaaagtactacttaatgttgcaccgcgttggttatcgataaagctacctatagcaaggaaaatccaaaacggggatgctaataagcatgcaataaacagccctatgataatttctctggcagcgaacaaagcaatatcgatttcatttaagttcaataattcatcgtggtaatgctgaactaatgcacatgataccactattattattggatgacggactactgttggtatattcccactggcgaaaaatggtaacaaatagaaagtgggtgccaatcggcaaaaacagagcgctgtagcagccagcagactatgcaactgatagagtatcgcctcacccatgctatcctctcgcgaatgctaaattcagcatttcaataccaaaagaatataatttttcgccataccatccgctcattaaaaaaaagcaaatacttacgcataataatttcacgccaaatggcaacgtctgttcttgcaactgtgttaccgtttgaaaaagccctactaataaaccaacaaatgtcgcaactgcgataggtcctgcagacataactaaaatcagatacagcgccctattccctgcaaaaacaatatcgtccatattttttcctcagggattaatggataggtcaaaatattgtaaaatgagtccttttgataacattgtccaaccgtccatcgcgacaaacaaaattaattttatcggtgtagatatggttaccggactcatcatcatcatacctaacgttaacagaacgctggatataaccagatccactacaacaaagggtaaatagatataaaaacctataataaatgcactttttatctcactcaacgcatatgccgggagtaacgagaaaattgaaatattatcatcatcgaatatctcttcattgtcttcagagctattcaccttctgaatcttttcaaaaaagttaaccaactccggttcggaatattttatcaaatatgatttataaccactcatgcctgtctcaacaaaattaacaaccgacgctacattattgaatgaaagattctcattctgactgttataatatatttccttcccaaccggcatcattacaaacattgacaatagcaaagcaaccccattaagtgtcatatttgatggcacttgctgaagccccagcgcgtttcggacaataacaaaaacaatcgagaatttaataaaatatgtcccggatgctattataaacggcaatagtgtaaataatgatagtatagctatcagcgaaatgctatttgacattattatgccctgataaccaagaatgaatctctacgcccaatttatcatccacttcaacaagttcgccatagccagttagcgcgccatttacacgtatttctatatttttctcagattcagaaagcagagatattattctttttgcacagagttcgtctatttcatatagattcattattttcttaccaagaacaaactcaatttttacaggcaagtcttcaaaactattaatcatctgatcgtcattttcatcataaatctcactctcgttttttttgatatcaaaatcatctgtttcaaaatcttcctcgtactcaaaatgatcagccatttttaactcctctggataaattaaatcacaaatttttgtattataaataaccgcataagccaaattatttgagattaataaaacatcaccaacttcaatatcaacaagacttctgtaacatgttttactaaatccaattacaaaatgaatggagcaatataacgattttttgtctaacgctggagcgtttccgtattggcagactgtgactttatctaaccaaagattcaattcccctgtccatattcttattagtggttgagcagggctcaatactccatcaaatactttacctacgcgcaaacgattatattttagttcaggatgctttagatttaacggggaactggataaactgaggcattcccctattaacctttccgtttctggcattaaagccatcccagcgagctcagatgaaattaagggaaatatttctccaagcaatacccatccagaccagctgccactctcttctgctatcggtagccatttagcactaaattcgggcattaataatgcaacatcttcgccattttctttccaattttgaaaagtggtttcaaacgtatgagtgtttcgatttactttcctcagaccgaacattaactttcatccttctgatcgttttcgaatttgctttcattttcttgctcctcataaggctgatgtcgttgtccttgtcgttcatcttgctcagtcaatacccaacgttgtgctgtaactcattatgaaaactatttaattccctcatcattgataaggttggacatctctttcaacatgagagtcattgaagctttcgaccaatttagcggaatgatagggcttggcgcttcatgcaaagttcccgacttgtggatatagttatagctttcgggaagtgccatttctggtacgctcctgccatttgcaccaatcatattctcgcctgttatttgggccaatgatctattcataaattgtactgagtcattcaaatactcttcttttcttgattctttataaacaattgctgctgattttgcataccatgagtcaaaaaaccattctgcttctgttgatggaatgaagctcttttctctttttgcatgcgaattttgatcggtatcggttttaatatcattgaaccaaaaatttgccgactgataattatccttctcgtatctttttataccatacggacctgctagttttttaactatttttagaacttgctcttttcttctggtgtttatctttgaaagatttgtaggataaataacattaagtaaagccgcatcggcttctctgtaatgtttatctttttccagataacctggggattctccccctaaatcaagctgtaacgttattctttcataacctttatctatgaggtggttcaacctcgttgttgaaagagtttcatccagttcattgactttagcttcgcgtagtaaatcagagacaaaaacagagtctttcttcgagagtaggtttgacaaacgttccagtccagaggtcaccagtgcaacggaagatgtgtttaatcgggcatcttcttcccatgctcaggaatcttccataacatagaaattggctttatccagataagcaatcagcagcgcaaccgactttaatcggtcacctttttgccaatcttcagcgttaatagtaccagtgttgattgcttgtataaggagatcaaggtaaagacctaaagcatcattttgtttatggttccacagctgcggcttgccttcttcctgcacatctgccatcacgggggagttgctgtcaaatcggatatgcacagcattcatttgcacgggaattccatccagtcgttttgggttgctaatgacgtcctgcatccgcttaatctggtcgggcgtagacatataatcccacagggtgagcagaaccttttttgcggctacactatttccctgatctgatactaatgccatatagccccataaactatccctcaaccagacagcatcatagtgggtttctgccgctgttttgtcatcttcgaaagtagaagcaagaataaacgttccccagggtttctccgtcaacgttaactttcgtgtgttttctgttaatgttagcaatccttgaatttcgtctttggtatagtggctctttatttcattttgtaatttggctgagtgaatcagaagacgataattaggatacttatctggatttaacgataaataacttttatctgttgctgcccccgtggaattaagaatgttaaatacagattcactcgtcacttctgcccctgtcgcctggcatgtgccgcacgaaaatataccagcgagcagaagagttaatgcagatttccctttcataaaatattccatcaatcgtttgttaaaagcgtagataaccacttatttaacaacttgaaaataaggtgttttacctgggttgttacaaaaggattgcattgcgtaaacgctttttatttacaacaaaatggggaagtattacggcgaagataaattggagcgggcgaagggaatcgaaccctcgtatagagcttgggaagctctcgttctaccattgaactacgcccgcttcgagatgcgtaaggcattataaaccttacgctctccttagcaagtgccacgctgctgactgctgattaattcgccatcagcattttggcttgctgccctgaggcggcaagtaacgtagcggatcaattgccgttgcacggtaacgaatctggaaatgcaggcgaacagatgccgcatccgtgctccccatagtggcgattttttgcccagccttcacgctttgcccattatttaccagcatcgtgtcattatgggcgtaagccgtaatgtaatcttcactgtgtttaatcatgatgagattaccgtagccacgcagctggttgcccacatacaccacctttcctgcacccgcggcgtaaataggtgtaccccgtggagctgagatatcaatccctttattgccgccatctgctgtcgaatacggcatgataactttccctgtcgttggccataaccaacaacgttgccctactggcggccaggatgatttcggtaccgctgatgacggtgtaaccgatgcggttttggtcgttgatttggcggttgatttacgtgtaatactgctacttttcgccccacccagttttagtttctgaccaacttcaatggtgtaagggggggaaatgccgttcagtcgcgccagttcttttacgctggttcccgtggtgcgcgaaatacgatatagcgtatccccccgtttcacggtgtaaacggagccggaatacgttcctgtatcggatgatttgctacccgaacagcccgccaaaagcagtccaaccgataacaacatcacgatacccagagattttttattcaggcgtcccgcactcaaaatctttcctcgcttaaaaaacaagacgccttatcatagcagccagcctcttgatacccaatctcttgcttctggaaaaacgtggtaatagagaaagaggttaatttcatttggcaaagggaagtatcatcagcaaaatattcgctgtagaggtatcgaacttcctgactttttaccctatttcccatcctgatgcgtaataatcccaatttatcacattgattttatcgccactcatattgatacgtatcactgcccctattcagagtcctgtttcgtatcatatctgtgtttttttaacgtcatcacacttcctacctcccctaacgcttatcgtcgtttctggcgtaaatcttgcctgcttagactaaatctttgccataagaaccaaatgttcaaatcgaggggatttctatggaagcgcgggaagcaaccgctacgggtgaatcatgcatgcgcgtcgatgccattgctaaggtcaccgggcgggcacgatatactgacgattatgttatggcgggcatgtgttatgcgaaatatgtacgtagccctatcgcacatggttatgccgtaagtattaatgatgaacaagccagaagtttgccgggcgtactggcgatttttacctgggaagatgtgcctgatattccattcgctacagctgggcatgcctggacacttgacgaaaacaagcgcgataccgccgatcgcgcactgctaactcgccatgttcgtcatcatggtgacgccgttgccatcgtcgtggcccgcgatgaactcacggcagaaaaagcggcgcaattggtcagcattgagtggcaagaattacccgttatcaccacgccagaagcggcgctggcagaagacgctgcaccaatccataacggtggcaatttactgaaacaaagcacgatgtcgacgggtaatgtccaacaaacaatcgatgccgccgactaccaggtacaggggcactatcagacccccgttattcaacattgtcacatggaaagcgtaacatcgctggcgtggatggaggatgactcgcgaattaccatcgtttccagcacccagatcccgcacattgttcgccgcgtggttggtcaggcgctggatattccctggtcatgcgtacgagtcatcaaaccatttgtcggtggcggttttggtaataaacaggatgtactggaagagccaatggcggcattcctgaccagcaagcttggcggcattccggtgaaagtttcccttagccgtgaagagtgtttcctcgcaacccgtacccgccacgcttttaccattgacgggcaaatgggcgtgaaccgcgacggaacattgaaaggttatagtctggatgttctgtctaacaccggcgcttatgcatctcacgggcactccatcgcttctgcgggggggaataaagtcgcttacctttatcctcgttgtgcctacgcttacagttcaaagacctgctataccaacctcccctcggctggtgcgatgcgtggttatggcgcgccacaagtcgtatttgccgttgagtctatgcttgatgacgccgcgacagcgttaggtattgatcctgttgaaattcgtttacgcaacgccgcccgcgaaggagatgctaatccgctcacgggcaaacgtatttacagcgcagggttgccggagtgtcttgaaaaaggccggaaaatctttgaatgggaaaaacgccgtgcagaatgccagaaccagcaaggcaatttgcgccgcggcgttggcgtcgcctgttttagctacacctctaacacctggcctgtcggcgtagaaatagcaggcgcgcgccttctgatgaatcaggatggaaccatcaacgtgcaaagcggcgcgacggaaatcggtcagggtgccgacaccgtcttctcgcaaatggtggcagaaaccgtgggggttccggtcagcgacgttcgcgttatttcaactcaagataccgacgttacgccgttcgatcccggcgcatttgcctcacgccagagctatgttgccgcgcctgcgctgcgcagtgcggcactattattaaaagagaaaatcatcgctcacgccgcagtcatgctacatcagtcagcgatgaatctgaccctgataaaaggccatatcgtgctggttgaacgaccggaagagccgttaatgtcgttaaaagatttggcgatggacgctttctaccaccctgaacgcggcgggcagctctctgctgaaagctccatcaaaaccaccactaacccaccggcgtttggctgtacctttgttgatctgacggtcgatattgcgctgtgcaaagtcaccatcaaccgcatcctcaacgttcatgattcagggcatattcttaatccactgctggcagaaggtcaggtacacggcggaatgggaatgggcattggctgggcgctatttgaagagatgatcatcgatgctaaaagcggcgtggtccgtaaccccaatctgctggattacaaaatgccgaccatgccggatctgccacaactggaaagcgcgttcgtcgaaatcaatgagccgcaatccgcatacggacataagtcactgggtgagccaccaataattcctgttgccgctgctattcgtaacgcggtgaagatggctaccggtgttgcaatcaatacactgccgctgacgccaaaacggttatatgaagagttccatctggcaggattgatttgaggataacatcatgtttgattttgcttcttaccatcgcgcagcaacccttgccgatgccatcaacctgctggctgacaacccgcaggccaaactgctcgccggtggcactgacgtactgattcagctccaccatcacaatgaccgttatcgccatattgttgatattcataatctggcggagctgcggggaattacgctggcggaagatggctcgctacgtatcggctctgcaacgacatttacccagctaatagaagatcctataactcaacgtcatctcccggcgttatgtgctgcggccacgtccattgctggaccgcagatccgtaacgtcgctacctacggtggaaatatttgcaacggtgccaccagcgcagattctgccacgccaacgctaatttatgacgcgaaactggagatccactccccgcgcggtgttcgtttcgtcccgattaatggctttcacaccgggccgggcaaagtgtctcttgagcatgacgaaatcctcgtcgcctttcattttccgccacagccgaaagaacacgcgggcagcgcgcattttaaatatgccatgcgcgacgcaatggatatttcaacgattggctgcgccgcacattgccgactggataacggcaatttcagcgaattacgcctggcatttggt
